(19) United States
(12) Patent Application Publication
(10) Pub. No.: US 2026/0218192 A1
(43) Pub. Date: Jul. 30, 2026

(54) COMPOSITIONS AND METHODS FOR TREATMENT OF MONOGENIC NEURODEVELOPMENT DISORDERS

(71) Applicant: PYC THERAPEUTICS LIMITED, Nedlands (AU)

(72) Inventors: Anja STIRNWEISS, Nedlands (AU); Dulce Vargas LANDIN, Nedlands (AU); Jessica NICHOLS, Nedlands (AU); Janya GRAINOK, Nedlands (AU); Adam MARTIN, Nedlands (AU)

(21) Appl. No.: 19/636,707

(22) Filed: Apr. 1, 2026

Related U.S. Application Data
(63) Continuation of application No. PCT/AU2024/051273, filed on Nov. 28, 2024.

(30) Foreign Application Priority Data
Nov. 29, 2023 (AU) 2023903841
Nov. 29, 2023 (AU) 2023903842
Dec. 4, 2023 (AU) 2023903916
Dec. 5, 2023 (AU) 2023903924
Dec. 5, 2023 (AU) 2023903927
Jun. 6, 2024 (AU) 2024901708
Jul. 17, 2024 (AU) 2024902223
Nov. 13, 2024 (AU) 2024903714

(51) Int. Cl. C12N 15/113; A61K 31/7088; A61P 25/28

(52) U.S. Cl. CPC C12N 15/113; A61K 31/7088; A61P 25/28; C12N 2310/321

(57) ABSTRACT

Described herein are antisense oligonucleotides (ASOs), vectors, and related compositions and methods for increasing endogenous expression of SHANK3 protein and uses thereof for conditions associated with SHANK3 haploinsufficiency such as Phelan-McDermid syndrome.

### CROSS-REFERENCE TO RELATED APPLICATIONS

[0001] The present application is a continuation application of International Patent Application No. PCT/AU2024/051273 filed on Nov. 28, 2024, which claims priority from AU 2023903841 filed on Nov. 29, 2023, AU 2023903842 filed on Nov. 29, 2023, AU 2023903916 filed on Dec. 4, 2023, AU 2023903924 filed on Dec. 5, 2023, AU 2023903927 filed on Dec. 5, 2023, AU 2024901708 filed on Jun. 6, 2024, AU 2024902223 filed on Jul. 17, 2024, and AU 2024903714 filed on Nov. 13, 2024, the entire contents each of which are incorporated herein by reference.

### SEQUENCE LISTING

[0002] The instant application contains a Sequence Listing which has been submitted electronically in XML format and is hereby incorporated by reference in its entirety. Said XML copy, created on Mar. 31, 2026, is named “047763-5033-US_SequenceListing.xml” and is approximately 22,306,874 bytes in size.

### TECHNICAL FIELD

[0003] The present disclosure generally is directed to oligonucleotides and related compositions and methods for treating conditions associated with mutations in the SHANK3 gene.

### BACKGROUND

[0004] SHANK3 is a widely expressed scaffolding protein enriched in the post-synaptic density of excitatory synapses in the brain. SHANK3 recruits and stabilizes ionotropic and metabotropic glutamate receptors (AMPA, NMDA, mGluR) to the post-synaptic density. SHANK3 gene mutations/deletions and SHANK3 haploinsufficiency underlie the rare genetic neurodevelopmental disorder, Phelan-McDermid syndrome, and have been attributed to 0.5%-1% of autism spectrum disorders (ASD), 2% of intellectual disability diagnoses, and 0.6%-2.16% of atypical schizophrenia diagnoses.

[0005] Phelan-McDermid syndrome is characterized by intellectual disability of varying degrees, neonatal hypotonia, absent to severely delayed speech development, moderate to profound developmental delay, motor regression and minor dysmorphic features. Approximately 14-70% of affected individuals develop seizures ranging from mild to severe. Other complications include kidney abnormalities, gastrointestinal issues, reduced perspiration and risk of overheating, lack of perception of pain, arachnoid cysts, or other comorbid neuropsychiatric illnesses. Children are typically diagnosed in early childhood, often due to significant delays in reaching early developmental milestones. There is currently no effective treatment for conditions caused by SHANK3 haploinsufficiency such as Phelan-McDermid syndrome. Thus, there is an ongoing need to provide effective compositions and methods for treating such conditions.

### SUMMARY

[0006] The SHANK3 gene includes 22 exons spanning 58 kb of genomic DNA on the terminal end of chromosome 22 (22q13 region) and its major protein product is a 1,607 amino acid polypeptide. There are at least six known isoforms that are temporally and spatially specific and have distinct functions at the synapse. SHANK3 contains five protein-protein interaction domains, and each isoform contains distinct combinations of these five domains.

[0007] While not wishing to be bound by theory, SHANK3 haploinsufficiency due to loss of function gene mutation(s), including nonsense, missense and frameshift mutations, as well as partial or whole gene deletions, results in insufficient protein production.

[0008] The present disclosure provides antisense oligonucleotides (ASO), antisense RNA (AR) expression vectors, and related compositions and methods to increase SHANK3 protein levels by modulating the stability of SHANK3 mRNA to increase the level of SHANK3 mRNAs encoding functional SHANK3 isoforms. Also disclosed are methods for treating conditions associated with SHANK3 haploinsufficiency.

[0009] Accordingly, in one aspect provided herein is an antisense oligonucleotide that binds within a targeted portion of the 3′ UTR of a SHANK3 mRNA (SEQ ID NO:1);

[0010] whereby binding of the antisense oligonucleotide within the targeted portion in a mammalian cell results in an increased level of SHANK3 protein in the mammalian cell. In some examples the targeted portion comprises the sequence according to SEQ ID NO:1079. In some examples the targeted portion consists of the sequence according to SEQ ID NO:1079.

[0011] In a related aspect provided herein is vector for expression, in a mammalian neuron, of an antisense RNA (AR) that binds within a targeted portion of the 3′ UTR of a SHANK3 mRNA;

[0012] whereby binding of the AR within the targeted portion in a mammalian cell results in an increased level of SHANK3 protein in the mammalian cell.

[0013] In some examples the sequence of the SHANK3 mRNA 3′ UTR comprises the sequence corresponding to SEQ ID NO:1. In some examples the targeted portion comprises the sequence according to SEQ ID NO:1079. In some examples the targeted portion consists of the sequence according to SEQ ID NO:1079.

[0014] In some examples the nucleotide sequence of the ASO or AR is at least 60%, 65%, 70%, 75%, 80%, 85%, 90%, 95%, or 100% complementary to the nucleotide sequence of the targeted portion over the length of the ASO or the AR.

[0015] In some examples the mammalian cell in which a SHANK3 level is increased is a neuron.

[0016] In some examples the vector includes a neuron-selective promoter for driving expression of the AR in the mammalian neuron. In some examples the neuron-selective promoter is selective for expression in a neuron type selected from the list consisting of cortical, striatal, cerebellar and hippocampal excitatory or inhibitory neurons, including, but not limited to cortical glutamatergic neurons, cortical GABAergic neurons, hippocampal glutamatergic neurons, and striatal inhibitory neurons. In some examples the vector includes an inducible promoter. In some examples the vector is a non-viral vector. In some examples a non-viral vector further comprises a transfection agent. In other examples the vector is a viral vector. In some examples, where the vector is a viral vector, the viral vector is a recombinant virus selected from the group consisting of: adeno-associated virus (AAV), adenovirus, lentivirus, and anellovirus.

[0017] In some examples the nucleotide sequence of the ASO or AR comprises up to two base mismatches to the targeted portion.

[0018] In some examples the nucleotide sequence of the ASO or AR corresponds to any one of SEQ ID NOs:1080-1093.

[0019] In some examples the nucleotide sequence of the ASO corresponds to any one of SEQ ID NOs:1080-1093 or 1096-1133. In some examples the nucleotide sequence of the ASO corresponds to any one of SEQ ID NOs:1080-1093. In some examples the nucleotide sequence of the ASO corresponds to any one of SEQ ID NOs:1084, 1087, or 1091-1093. In some examples the nucleotide sequence of the ASO corresponds to SEQ ID NO:1084. In some examples the nucleotide sequence of the ASO corresponds to SEQ ID NO:1087. In some examples the nucleotide sequence of the ASO corresponds to SEQ ID NO:1091. In some examples the nucleotide sequence of the ASO corresponds to SEQ ID NO:1092. In some examples the nucleotide sequence of the ASO corresponds to SEQ ID NO:1093.

[0020] In some examples the nucleotide sequence of the ASO or AR corresponds to any one of SEQ ID NOs:1096-1133. In some examples the nucleotide sequence of the ASO or AR corresponds to any one of SEQ ID NOs:1096, 1109, 1119, and 1128. In some examples the nucleotide sequence of the ASO corresponds to SEQ ID NO:1096. In some examples the nucleotide sequence of the ASO corresponds to SEQ ID NO:1109. In some examples the nucleotide sequence of the ASO corresponds to SEQ ID NO:1119. In some examples the nucleotide sequence of the ASO corresponds to SEQ ID NO:1128.

[0021] In some examples any of the foregoing ASOs include a backbone modification. In some examples the backbone modification includes a phosphorothioate linkage or a phosphorodiamidate linkage. In other examples the ASO includes a phosphorodiamidate morpholino, an arabinonucleic acid, a locked nucleic acid, a peptide nucleic acid, a 2′-O-modification such as a 2′-O-methyl, a 2′-Fluoro, or a 2′-O-methoxyethyl moiety, or an abasic spacer subunit. In some examples the abasic spacer subunit comprises the structure according to Formula I.

[chemical structure]

[0022] In some examples the nucleotide sequence of the ASO comprises one or more abasic spacer subunits and/or locked nucleic acids. In some examples the nucleotide sequence of the ASO comprises one or more abasic spacer subunits and one or more locked nucleic acids. In some examples, where the ASO comprises at least one abasic spacer subunit, at least one locked nucleic acid, or both, the nucleotide sequence of the ASO corresponds to any one of SEQ ID NOs:1096-1133. In some examples the nucleotide sequence of the ASO or AR targeting the 3′ UTR corresponds to any one of SEQ ID NOs:3-1133, SEQ ID NOs:1134-4583, and SEQ ID NOs:16254-18750.

[0023] In some examples the ASO includes at least one modified sugar moiety. In other examples each sugar moiety in the ASO is a modified sugar moiety. In some examples the ASO includes a 2′-O-methoxyethyl moiety. In other examples each nucleotide of the ASO includes a 2′-O-methoxyethyl moiety.

[0024] In some examples of any of the foregoing ASOs or vectors, the nucleotide sequence of the ASO or AR is 10 to 50 nucleotides, 15 to 40 nucleotides, 17 to 30 nucleotides, 15 to 30 nucleotides, 18 to 40 nucleotides, 17 to 25 nucleotides, 20 to 35 nucleotides, 15 to 30 nucleotides, 20 to 30 nucleotides, 22 to 30 nucleotides, 24 to 30 nucleotides, 25 to 30 nucleotides, or 26 to 30 nucleotides in length. In some examples, where the ASO is 17 to 30 nucleotides in length, the ASO includes one or more phosphorodiamidate morpholino moieties. In other examples, where the ASO is 15 to 30 nucleotides in length, the ASO includes one or more phosphorodiamidate morpholino moieties.

[0025] In some examples any of the foregoing ASOs are linked to a functional moiety. In some examples the functional moiety includes a delivery moiety. In some examples the delivery moiety is selected from the group consisting of: lipids, polyethers, peptides, carbohydrates, receptor binding peptide (RBP), and antibodies. In some examples, wherein the ASO includes a delivery moiety, the delivery moiety includes a cell-penetrating peptide (CPP). In some examples the CPP comprises the amino acid sequence corresponding to SEQ ID NO:2. In some examples the delivery moiety includes a N-acetylgalactosamine (GalNAc) or glycan moiety. In some examples the delivery moiety includes a fatty acid or lipid moiety. In some embodiments the fatty acid chain length is about C8 to C20. In other examples the functional moiety includes a stabilising moiety. In some examples the functional moiety is covalently linked to the ASO. In other examples the functional moiety is non-covalently linked to the ASO. In some examples the functional moiety is linked to the 5′ end of the ASO. In other examples the functional moiety is linked to the 3′ end of the ASO. In some examples any of the foregoing ASOs also include a delivery nanocarrier, wherein the nanocarrier is complexed with the ASO. In some examples the delivery nanocarrier is selected from the group consisting of: lipoplexes, liposomes, exosomes, inorganic nanoparticles, and DNA nanostructures. In some examples the delivery nanocarrier includes a lipid nanoparticle (LNP) encapsulating the ASO.

[0026] In a related aspect provided herein is a pharmaceutical composition that includes any of the foregoing ASOs, vectors, or compositions and a pharmaceutically acceptable excipient. In some preferred embodiments the pharmaceutical compositions comprises an ASO as disclosed herein. In some embodiments the pharmaceutical composition is provided as a gymnotic formulation of the ASO (i.e., a formulation devoid of agents to facilitate transfection of the ASO).

[0027] In a further related aspect provided herein is a method for preventing or treating a condition associated with SHANK3 haploinsufficiency, the method comprising administering to a subject in need thereof a therapeutically effective amount of the foregoing pharmaceutical composition. In some examples the condition to be treated is Phelan-McDermid syndrome, an autism spectrum disorder, schizophrenia, or an intellectual disability. In some examples the condition to be treated is Phelan-McDermid syndrome. In some examples the subject to be treated is a human subject.

[0028] In a further aspect provided herein is the use of any of the foregoing antisense oligonucleotides or vectors in the manufacture of a medicament for prevention or treatment of a condition associated with SHANK3 haploinsufficiency.

[0029] In some examples of the foregoing methods of treatment or uses, the level of SHANK3 protein in at least a plurality of cells in the subject is increased about 1.1 to about 5 fold in cells (e.g., neurons) in vitro or ex vivo, e.g., 1.2 fold, 1.3 fold, 1.5 fold, 1.7 fold, 2 fold, 2.2 fold, 2.5 fold, 2.7 fold, 3 fold, 3.3 fold, 3.5 fold, 4 fold, 4.3 fold, 4.5 fold, 4.7 fold, or another increase in SHANK3 protein levels from about 1.1 fold to about 5 fold in cells in a subject compared to the level in the absence of the pharmaceutical composition.

[0030] In some examples of the foregoing methods of treatment or uses, the ratio of the levels of SHANK3 protein essential isoforms relative to each other following the treatment are unchanged.

[0031] In yet another aspect provided herein is a genetically modified cell comprising any of the foregoing ASOs or vectors. In some examples the genetically modified cell is a mammalian cell. In some examples the genetically modified mammalian cell is a human cell. In some examples the genetically modified mammalian cell is a genetically modified neuron or neural progenitor. In some examples, the genetically modified neuron is selected from the group consisting of: cortical, striatal, cerebellar and hippocampal excitatory or inhibitory neurons, including, but not limited to cortical glutamatergic neurons, cortical GABAergic neurons, hippocampal glutamatergic neurons, and striatal inhibitory neurons. In some examples the genetically modified neuron is a cortical glutamatergic neuron obtained by differentiation of an hiPSC line, wherein the hiPSC line is derived from a subject suffering from Phelan-McDermid syndrome or a subject not suffering from Phelan-McDermid syndrome. In some embodiments the genetically modified mammalian cell is not a human embryonic cell. In some examples the genetically modified mammalian cell is from a cell line. In some examples the cell line is a human induced pluripotent stem cell (hiPSC) line or a cell line derived from neurons.

[0032] In other examples the level of SHANK3 can be increased by modulating splicing (including alternative splicing) of SHANK3 pre-mRNA transcripts. The term alternative splicing refers to a process whereby exons, or part of an exon of a gene, or introns or part of an intron may be included within or excluded from the final mRNA transcript. Mature noncanonical mRNA transcripts can be non-productive due to a frame shift that may induce the nonsense mediated decay pathway. In other cases, translation of the noncanonical mRNA can produce a truncated but non-functional protein. Alternative splicing of the SHANK3 pre-RNA transcripts can downregulate overall SHANK3 mRNA and protein expression.

[0033] Introns are removed by a large RNA-protein complex termed the spliceosome, which orchestrates complex interactions between primary transcripts, small nuclear RNAs (snRNAs) and a large number of proteins. Spliceosomes assemble on each intron in an ordered manner, starting with recognition of the 5′ splice site (5′ss) by U1 snRNA or the 3′ splice site (3′ ss) by the U2 pathway, which involves binding of the U2 auxiliary factor (U2AF) to the 3′ ss region to facilitate U2 binding to the branch point sequence (BPS). U2AF is a stable heterodimer composed of a U2AF2-encoded 65-kD subunit (U2AF65), which binds the polypyrimidine tract (PPT), and a U2AF1-encoded 35-kD subunit (U2AF35), which interacts with highly conserved AG dinucleotides at 3′ ss and stabilizes U2AF65 binding. In addition to the BPS/PPT unit and 3′ ss/5′ ss, accurate splicing requires auxiliary sequences or structures that activate or repress splice site recognition, known as intronic or exonic splicing enhancers or silencers. These elements allow genuine splice sites to be recognized among a vast excess of cryptic or pseudo-sites in the genome of higher eukaryotes, which have the same sequences but outnumber authentic sites by an order of magnitude.

[0034] In some examples the present disclosure provides antisense oligonucleotides (ASO), antisense RNA (AR) expression vectors, and related compositions and methods to increase SHANK3 protein levels. While not wishing to be bound by theory, it is believed that in some examples ASOs effect an increase in SHANK3 protein levels by modulating splicing of SHANK3 mRNA to increase the level of canonical SHANK3 mRNA encoding full length, functional SHANK3. More specifically, it is believed that the ASOs modulate splicing to decrease aberrant intron retention, particularly any one of introns 6, 7, 16, 17, 18, or 20. Also disclosed are methods for treating conditions associated with SHANK3 haploinsufficiency.

[0035] Accordingly, in one aspect provided herein is an antisense oligonucleotide that binds within a targeted portion of a SHANK3 pre-mRNA, whereby the level of SHANK3 mRNA encoding full length, functional SHANK3 is increased, wherein the sequence of the targeted portion corresponds to SEQ ID NO:1 or SEQ ID NO:18751.

[0036] In a related aspect provided herein is a vector for expression, in a mammalian neuron, of an antisense RNA (AR) that binds within a targeted portion of a SHANK3, whereby the level of SHANK3 mRNA encoding full length, functional SHANK3 is increased, wherein the sequence of the targeted portion corresponds to SEQ ID NO:1. In some examples the vector includes a neuron-selective promoter for driving expression of the antisense RNA in the mammalian neuron. In some examples the neuron-selective promoter is selective for expression in a neuron type selected from the list consisting of: cortical excitatory neurons, cortical inhibitory neurons, hippocampal excitatory neurons, hippocampal inhibitory neurons, striatal inhibitory neurons, striatal excitatory neurons, cerebellar excitatory neurons, cerebellar inhibitory neurons, and GABAergic neurons. In some examples the vector includes an inducible promoter. In some examples the vector is a non-viral vector. In some examples a non-viral vector further comprises a transfection agent. In other examples the vector is a viral vector. In some examples, where the vector is a viral vector, the viral vector is a recombinant virus selected from the group consisting of: adeno-associated virus (AAV), adenovirus, lentivirus, and anellovirus.

[0037] In some examples of any of the foregoing ASOs or vectors, binding of the antisense oligonucleotide or AR to the SHANK3 pre-mRNA modulates splicing of a SHANK3 mRNA derived therefrom In some examples of any of the foregoing methods, ASOs, vectors, or compositions, the modulation of splicing reduces a level of aberrant retention of an intron. In some examples the sequence of an antisense oligonucleotide or AR disclosed herein includes up to two base mismatches to the targeted portion.

[0038] In some examples the nucleotide sequence of the ASO or AR is at least 60%, 65%, 70%, 75%, 80%, 85%, 90%, 95%, or 100% complementary to the nucleotide sequence of the targeted portion over the length of the ASO or the AR. In some examples the nucleotide sequence of the ASO or AR that binds to a targeted portion of the SHANK3 pre-mRNA corresponds to any one of SEQ ID NOs:4584-16253.

[0039] In some examples any of the foregoing ASOs include a backbone modification. In some examples the backbone modification includes a phosphorothioate linkage or a phosphorodiamidate linkage. In other examples the ASO includes a phosphorodiamidate morpholino, an arabinonucleic acid, a locked nucleic acid, a peptide nucleic acid, or a 2′-O-modification such as a 2′-O-methyl, a 2′-Fluoro, or a 2′-O-methoxyethyl moiety. In some examples the ASO includes at least one modified sugar moiety. In other examples each sugar moiety in the ASO is a modified sugar moiety. In some examples the ASO includes a 2′-O-methoxyethyl moiety. In other examples each nucleotide of the ASO includes a 2′-O-methoxyethyl moiety.

[0040] In some examples of any of the foregoing ASOs or vectors, the nucleotide sequence of the ASO or AR is 10 to 50 nucleotides, 15 to 40 nucleotides, 18 to 40 nucleotides, 17 to 25 nucleotides, 20 to 35 nucleotides, 20 to 30 nucleotides, 22 to 30 nucleotides, 24 to 30 nucleotides, 25 to 30 nucleotides, or 26 to 30 nucleotides in length. In some examples. In some examples of any of the foregoing ASOs or vectors, the nucleotide sequence of the ASO or AR is 17 to 30 nucleotides in length.

[0041] In some examples any of the foregoing ASOs also includes a linked functional moiety. In some examples the functional moiety includes a delivery moiety. In some examples the delivery moiety is selected from the group consisting of lipids, peptides, carbohydrates, and antibodies. In some examples, wherein the ASO includes a delivery moiety, the delivery moiety includes a cell-penetrating peptide (CPP). In some examples the delivery moiety includes a N-acetylgalactosamine (GalNAc) or glycan moiety. In some examples the delivery moiety includes a fatty acid or lipid moiety. In some embodiments the fatty acid chain length is about C8 to C20. In other examples the functional moiety includes a stabilising moiety. In some examples the functional moiety is covalently linked to the ASO. In other examples the functional moiety is non-covalently linked to the ASO. In some examples the functional moiety is linked to the 5′ end of the ASO. In other examples the functional moiety is linked to the 3′ end of the ASO. In some embodiments of any of the foregoing methods, the level of SHANK3 protein in at least a plurality of mammalian cells is increased about 1.1 to about 5 fold in cells (e.g., neurons) in vitro or ex vivo, e.g., 1.2 fold, 1.3 fold, 1.5 fold, 1.7 fold, 2 fold, 2.2 fold, 2.5 fold, 2.7 fold, 3 fold, 3.3 fold, 3.5 fold, 4 fold, 4.3 fold, 4.5 fold, 4.7 fold, or another increase in SHANK3 protein levels from about 1.1 fold to about 5 fold in cells in a subject or in vitro or in vivo, compared to the level in a plurality of mammalian cells in the absence of the oligonucleotide or the antisense RNA.

[0042] In a related aspect provided herein is a pharmaceutical composition that includes any of the foregoing ASOs or vectors and a pharmaceutically acceptable excipient.

[0043] In a further related aspect provided herein is a method for preventing or treating a condition associated with SHANK3 haploinsufficiency, the method comprising administering to a subject in need thereof a therapeutically effective amount of the foregoing pharmaceutical composition. In some examples the condition to be treated is Phelan-McDermid syndrome, an autism spectrum disorder, schizophrenia, or an intellectual disability. In some examples the condition to be treated is Phelan-McDermid syndrome. In some examples the subject to be treated is a human subject.

[0044] In a further aspect provided herein is the use of any of the foregoing antisense oligonucleotides, vectors, or compositions in the manufacture of a medicament for prevention or treatment of a condition associated with SHANK3 haploinsufficiency.

[0045] In some examples of the foregoing methods of treatment or uses, the level of SHANK3 protein in a least a plurality of cells in the subject is increased about 1.1 to about 5 fold in cells (e.g., neurons) in vitro or ex vivo, e.g., 1.2 fold, 1.3 fold, 1.5 fold, 1.7 fold, 2 fold, 2.2 fold, 2.5 fold, 2.7 fold, 3 fold, 3.3 fold, 3.5 fold, 4 fold, 4.3 fold, 4.5 fold, 4.7 fold, or another increase in SHANK3 protein levels from about 1.1 fold to about 5 fold in cells in a subject or in vitro or in vivo. compared to the level in the absence of the pharmaceutical composition.

[0046] In yet another aspect provided herein is a genetically modified cell comprising any of the foregoing ASOs or vectors. In some examples the genetically modified cell is a mammalian cell. In some examples the genetically modified mammalian cell is a human cell. In some examples the genetically modified mammalian cell is a neuron or a neural progenitor. In some examples, the genetically modified mammalian cell is a neuron selected from the group consisting of: cortical glutamatergic neurons, cortical GABAergic neurons, hippocampal glutamatergic neurons, and striatal inhibitory neurons. In some examples the genetically modified mammalian cell is from a cell line. In some examples the cell line is a hiPSC cell line or a cell line derived from neurons.

### BRIEF DESCRIPTION OF THE ACCOMPANYING DRAWINGS

[0047] FIG. 1—Illustration of SHANK3 transcript and ASO target region. (A) SHANK3 transcript model (gene id ENSG00000251322.11 from Gencode v45). Exons and introns are indicated in black color and 5′ and 3′ UTRs indicated in lighter color. ASOs were designed to target the 3′ UTRs of SHANK3 transcript to mediate upregulation of SHANK3 gene expression. B) seed sequence of hsa-mir-504-5p, a target sequence for the miRNA hsa-mir-504-5p. (C) Negative SHANK3 gene expression regulation partly induced by the binding of hsa-mir-504-5p to the 3′ UTR of SHANK3 mRNA at its target site sequence, resulting in a reduction of SHANK3 protein. (D) illustration of a model in which a steric-blocking ASO binds directly to the 3′ UTR of SHANK3 transcripts inhibiting the binding of hsa-mir-504-5p and its induction of RNA degradation leading to a net increase in SHANK3 transcript levels and SHANK3 protein production.

[0048] FIG. 2—Human whole brain SHANK3 mRNA and hsa-mir-504-5p expression during human neurodevelopment. SHANK3 mRNA expression was measured using poly-A enriched bulk single-ended RNA-seq data from samples across all brain regions at 9 prenatal and 18 postnatal time points. (PCW, post-conception week; M, months; Y, years; cpm, counts per million)

[0049] FIG. 3—PPMO screen in SH-SY5Y cells to upregulate SHANK3 protein expression. SHANK3 protein expression was assessed in PPMO treated SH-SY5Y cells using an ELISA assay. A non-targeting control (NTC), predicted not to hybridize to human transcripts, was included as a negative control. Bar graph represents mean±S.D. n=2 independent experiments with 3 technical replicates per experiment. UT=untreated cells. NTC=non-targeting control. PPMOs with SEQ ID NOs: 160 and 687 were selected for further evaluation in iPSC-derived neurons.

[0050] FIG. 4—PPMO effect on SHANK3 protein expression in iPSC-derived glutamatergic neurons. iPSC-derived glutamatergic neurons derived from healthy controls (non-PMS controls) were incubated with a peptide-conjugated PMO (SEQ ID NOs: 160 and 687) in triplicate and a non-targeting control (NTC) for 7 days. A non-targeting control, predicted not to hybridize to human transcripts, was included as a negative control. Bar graph represents mean±S.D. of SHANK3 protein normalized to total protein amount loaded relative that of untreated cells. n=1 biological replicate per cell line. UT=untreated cells. NTC=non-targeting control.

[0051] FIG. 5—SHANK3 protein analysis in PPMO-treated iPSC-glutamatergic neurons derived from Phelan-McDermid Syndrome (PMS). iPSCs derived from in a PMS patient harboring a heterozygous large deletion in the SHANK3 gene, were differentiated into glutamatergic neurons used to test the efficacy of a PPMO targeted to the SHANK3 transcript. The PPMO has an oligonucleotide sequence corresponding to “SEQ ID NO: 1847” (originally disclosed in WO 2023/235915) linked to a CPP (SEQ ID NO:2 originally disclosed as “SEQ ID NO:12694” in WO 2023/235915) and was incubated with iPSC-derived glutamatergic neurons in triplicate for 7 days. A non-targeting control, predicted not to hybridize to human transcripts, was included as a negative control. Bar graph represents mean±S.D. of SHANK3 protein normalized to total protein amount loaded relative that of untreated cells. n=1 biological replicate. UT=untreated cells. Graph was generated using GraphPad Prism Ver 10.2.3 software. *p<0.05, **p<0.005, ***p<0.001. One-Way ANOVA.

[0052] FIG. 6—SHANK3 protein isoform analysis in ASO-treated hiPSC (non-affected subject)-derived glutamatergic neurons. iPSC-derived glutamatergic neurons were incubated with an ASO (SEQ ID NO: 1193 disclosed in WO 2023/235915) in triplicate for 7 days. Bar graph represents mean±S.D. of the SHANK3 protein isoform, normalized to the respective SHANK3 isoform relative to that of untreated cells. n=1 biological replicate per cell line. UT=untreated cells. Levels of each of the major isoforms evaluated were increased, and the relative ratio of expression levels between the essential isoforms appears unchanged.

[0053] FIG. 7—Illustration of SHANK3 transcript and ASO design within the target region of the 3′ UTR of SHANK3 transcript. (A) SHANK3 transcript model (gene id ENSG00000251322.11 from Gencode v45) is depicted, with exons and introns shown in dark gray and the 5′ and 3′ UTRs in a lighter shade. (B) A segment of the 3′ UTR sequence corresponding to SEQ ID NO:1079. The miR-504 seed sequence is highlighted in bold. (C) A black line indicates the target sequences of ASOs, designed to upregulate SHANK3 gene expression. This is achieved by altering the secondary structure of mRNA or steric blocking the binding of regulators that reduce the efficacy of SHANK3 protein translation. The numbers correspond to SEQ ID numbers of ASOs as disclosed herein (see also Tables 1-3 of the Appendix); locked nucleic acid (LNA)-modified sequences are marked with a (*) after their SEQ ID number.

[0054] FIG. 8—Effect of 2′MOEs on SHANK3 protein levels in human iPSC-derived glutamatergic neurons. The bar plots represent the mean±SD of SHANK3 protein normalized to the total protein amount loaded, relative to the normalized SHANK3 protein of untreated cells (y-axis). Data is derived from three technical replicates from one biological replicate. Bar plots in white represent untreated cell controls (UT) and to non-targeting control (NTC) at 1 μM; grey bars represent ASO-treated cells at 0.5 μM; and black bars represent ASO-treated cells at 1 μM. ASOs are split by length. The dotted line represents the baseline of untreated cells at 1. UT refers to untreated cells and NTC indicates the non-targeting control. Graph was generated using GraphPad Prism Version 10.2.3 software.

[0055] FIG. 9—Effect of selected MOEs on SHANK3 protein levels in human iPSC-derived neurons. The bar plots represent the mean±SD of SHANK3 protein normalized to the total protein amount loaded, relative to the normalized SHANK3 protein of untreated cells (y-axis). Data is derived from three technical replicates from one biological replicate. Bar plots in colour white correspond to untreated cell controls (UT) and to non-targeting control (NTC) at highest concentration (30 μM); striped pattern to cells treated with a 7.5 μM dose; grey colour to cells treated with a 15 μM dose; and black colour to cells treated with a 30 μM dose. The bar graphs are grouped by ASO length used in the corresponding experiments. The dotted line represent the baseline of untreated cells at 1.0-fold change. UT stands for untreated cells and NTC for non-targeting control. Graph was generated using GraphPad Prism Version 10.2.3 software.

[0056] FIG. 10—Effect of selected LNA modified 2′MOEs on SHANK3 protein levels in human iPSC-derived neurons. The bar plots represent the mean±SD of SHANK3 protein normalized to the total protein amount loaded, relative to the normalized SHANK3 protein of untreated cells (y-axis). Data is derived from three technical replicates from one biological replicate. Bar plots in colour white correspond to untreated cell controls (UT) and to non-targeting control (NTC) at highest concentration (30 μM); striped pattern to cells treated with a 7.5 μM dose; grey colour to cells treated with a 15 μM dose; and black colour to cells treated with 30 μM dose. The dotted line represents the baseline of untreated cells at 1.0-fold change. Panel (A) shows the SHANK3 protein changes after the treatment with 18-mer ASOs with sequences corresponding to SEQ ID NOs: 1091, 1093, and 1092; while panel (B) shows the ASO derivates from a 15-mer, a 17-mer and a 20-mer with sequences corresponding to SEQ ID NOs: 1084, 1094, and 1087, respectively. UT stands for untreated cells and NTC for non-targeting control. Graphs were generated using GraphPad Prism Version 10.2.3 software.

[0057] FIG. 11—Effect of selected MOEs on SHANK3 protein levels in human iPSC-derived neurons from Phelan-McDermid Syndrome patients. The bar plots represent the mean±SD of SHANK3 protein normalized to the total protein amount loaded, relative to the normalized SHANK3 protein of untreated cells (y-axis). Data is derived from three technical replicates from one biological replicate. Panel (A) shows changes in SHANK3 protein levels following treatment with ASOs corresponding to SEQ ID NOs: 1094, 1087, 1091, 1093, and 1092; in which the white bar indicates untreated controls (UT); bars with stripes represent cells treated at 7.5 μM; bars with a dotted pattern indicate cells treated at 15 μM; and bars in solid gray represent cells treated at 30 μM; and black represent cells treated at 45 μM. Panel (B) shows changes in SHANK3 protein levels after treatment with SEQ ID NOs: 1122, 1093, 1091, 1126, 1128, and 1092. White bar represent untreated controls (UT), striped bar for 7.5 μM, gray bar for 15 μM dose, and black bar for 30 μM. In both panels, dotted lines represent the baseline of untreated cells at 1.0-fold change. UT denotes untreated cells. Graphs were generated using GraphPad Prism Version 10.2.3 software. * p. adj. <0.05, ** p. adj. <0.01, *** p. adj. <0.005, **** p. adj. <0.001. One-Way ANOVA.

[0058] FIG. 12—Functional assessment of gymnotic ASO treatment in Phelan-McDermid patient iPSC-derived glutamatergic neurons. The bar plots represent the mean±SD of the signal intensity of spontaneous calcium oscillations (y-axis). Data is derived from three technical replicates from one biological replicate. Panel (A) shows the baseline signal intensity of spontaneous calcium oscillations in two untreated non-PMS cell lines (SHANK3-non-deficient) shown in white and grey, two untreated PMS patient cell lines (SHANK3-deficient) shown in black. The left side (including PMS patient #1) of the plot corresponds to a 20,000-30,000 cells seeding; while the right side (including PMS patient #2) to a 10,000 cells seeding. The dotted line represents the baseline level of spontaneous calcium oscillations signal in untreated SHANK3-non-deficient commercial cells at 1.0-fold change. Panel (B) shows the functional assessment in PMS patient cells 21 days after a single-dose ASO treatment. White bars represent untreated cell control (UT) and non-targeting control (NTC); grey bars represent cells treated with a 15 μM ASO; black bar represent cells treated with a 30 μM concentration. The dotted line represents the untreated baseline at 1.0-fold change. Panel (C) shows the functional assessment in PMS patient cells 21 days after a double-dose ASO treatment, White bar represent control group including untreated cell control (UT), non-targeting control (NTC), negative assay control (BAPTA) and positive assay control (Ionomycin). Black bar represent cells treated with ASO at 15 μM. The dotted line represents the baseline of untreated cells at 1.0-fold change. UT stands for untreated cells and NTC to non-targeting control. BAPTA is used as an assay control to chelate free calcium ions, thereby suppressing calcium-dependent signaling. Ionomycin acts as a calcium ionophore, increasing intracellular calcium levels by facilitating calcium entry into cells. Graphs were generated using GraphPad Prism Version 10.2.3 software.

### DETAILED DESCRIPTION

### General

[0059] Throughout this specification, unless specifically stated otherwise or the context requires otherwise, reference to a single step, composition of matter, group of steps or group of compositions of matter shall be taken to encompass one and a plurality (i.e., one or more) of those steps, compositions of matter, groups of steps or groups of compositions of matter. Thus, as used herein, the singular forms “a”, “an” and “the” include plural aspects unless the context clearly dictates otherwise. For example, reference to “a” includes a single as well as two or more; reference to “an” includes a single as well as two or more; reference to “the” includes a single as well as two or more and so forth.

[0060] Each example of the present disclosure described herein is to be applied mutatis mutandis to each and every other example unless specifically stated otherwise.

[0061] Those skilled in the art will appreciate that the disclosure herein is susceptible to variations and modifications other than those specifically described. It is to be understood that the disclosure includes all such variations and modifications. The disclosure also includes all of the steps, features, compositions and compounds referred to or indicated in this specification, individually or collectively, and any and all combinations or any two or more of said steps or features.

[0062] The present disclosure is not to be limited in scope by the specific examples described herein, which are intended for the purpose of exemplification only. Functionally-equivalent products, compositions and methods are clearly within the scope of the disclosure, as described herein.

[0063] The present disclosure is performed without undue experimentation using, unless otherwise indicated, conventional techniques of molecular biology, microbiology, virology, recombinant DNA technology, peptide synthesis in solution, solid phase peptide synthesis, and immunology. Such techniques are described and explained throughout the literature in sources such as Perbal 1984, Sambrook et al., 2001, Brown (editor) 1991, Glover and Hames (editors) 1995 and 1996, Ausubel et al. including all updates until present, Coligan et al. (editors) (including all updates until present), Maniatis et al. 1982, Gait (editor) 1984, Hames and Higgins (editors) 1984, Freshney (editor) 1986.

[0064] The term “and/or”, e.g., “X and/or Y” shall be understood to mean either “X and Y” or “X or Y” and shall be taken to provide explicit support for both meanings or for either meaning.

[0065] The term “about”, unless stated to the contrary, refers to ±20%, more preferably ±10%, of the designated value. For the avoidance of doubt, the term “about” followed by a designated value is to be interpreted as also encompassing the exact designated value itself (for example, “about 10” also encompasses 10 exactly).

[0066] Throughout this specification the word “comprise”, or variations such as “comprises” or “comprising”, will be understood to imply the inclusion of a stated element, integer or step, or group of elements, integers or steps, but not the exclusion of any other element, integer or step, or group of elements, integers or steps.

[0067] The term “antisense oligonucleotide”, “antisense oligomer” or “ASO,” as used herein, encompasses oligonucleotides and any other oligomeric molecule that comprises nucleobases capable of hybridizing to a complementary sequence on a target RNA transcript, including, but not limited to, those that do not comprise a sugar moiety, such as in the case of a peptide nucleic acid (PNA). Preferably, the ASO is an ASO that is resistant to nuclease cleavage or degradation.

[0068] The phrase “binds to a targeted portion” or “binds within a targeted portion,” in reference to an ASO or AR, as used herein, refers to specific hybridization between the ASO or AR nucleotide sequence and a target nucleotide sequence that is complementary within the ranges set forth herein. In some examples the targeted portion comprises the sequence according to SEQ ID NO:1079. In some examples the targeted portion consists of the sequence according to SEQ ID NO:1079. In some examples, specific hybridization occurs where, under ex vivo conditions, the hybridization occurs under high stringency conditions. By “high stringency conditions” is meant that the ASO or AR, under such ex vivo conditions, hybridize to a target sequence in an amount that is detectably stronger than non-specific hybridization. High stringency conditions, then, are conditions that distinguish a polynucleotide with an exact complementary sequence, or one containing only a few scattered mismatches from a random sequence that happened to have a few small regions (e.g., 1-5 bases) that matched the probe. Such small regions of complementarity are more easily melted than a full-length complement of 12-17 or more bases, and moderate stringency hybridization makes them easily distinguishable. In one example, high stringency conditions include, for example, low salt and/or high temperature conditions, such as provided by about 0.02-0.1 M NaCl or the equivalent, at temperatures of about 50-70° C. The skilled person will appreciate that under in vivo conditions, the specificity of hybridization between an ASO or an AR and its target sequence is defined in terms of the level of complementarity between the ASO or an AR and the target sequence to which it hybridizes within a cell.

[0069] The phrase “antisense oligonucleotide or AR comprises a mismatch to the targeted region” as used herein refers to the fact that the antisense oligonucleotide or AR sequence differs from the reverse complement of the target sequence with which it is to hybridize at the referred-to (mismatched) position. For example, for a target sequence:

[0070] 5′-AGUGGAUUGCUAGU-3′, a perfectly complementary ASO sequence would include 5′-ACUAGCAAUCCACU-3′, where the ASO 5′-ACUAGCACUCCACU-3′ includes a “base mismatch” with respect to the target sequence at the underlined/bold position.

[0071] The term “gymnotic” in reference to an ASO or ASO delivery as used herein refers to delivery of an ASO into cells in the absence of a transfection agent.

[0072] The term “peptide” is intended to include compounds composed of amino acid residues linked by amide bonds. A peptide may be natural or unnatural, ribosome translated or synthetically derived. Typically, a peptide will consist of between 2 and 200 amino acids. For example, the peptide may have a length in the range of 10 to 20 amino acids or 10 to 30 amino acids or 10 to 40 amino acids or 10 to 50 amino acids or 10 to 60 amino acids or 10 to 70 amino acids or 10 to 80 amino acids or 10 to 90 amino acids or 10 to 100 amino acids, including any length within said range(s). The peptide may comprise or consist of fewer than about 150 amino acids or fewer than about 125 amino acids or fewer than about 100 amino acids or fewer than about 90 amino acids or fewer than about 80 amino acids or fewer than about 70 amino acids or fewer than about 60 amino acids or fewer than about 50 amino acids.

[0073] Peptides, as referred to herein, include “inverso” peptides in which all L-amino acids are substituted with the corresponding D-amino acids, “retro-inverso” peptides in which the sequence of amino acids is reversed and all L-amino acids are replaced with D-amino acids.

[0074] Peptides may comprise amino acids in both L- and/or D-form. For example, both L- and D-forms may be used for different amino acids within the same peptide sequence. In some examples the amino acids within the peptide sequence are in L-form, such as natural amino acids. In some examples the amino acids within the peptide sequence are a combination of L- and D-form. Further, peptides may comprise unusual, but naturally occurring, amino acids including, but not limited to, hydroxyproline (Hyp), beta-alanine, citrulline (Cit), omithine (Orn), norleucine (Nle), 3-nitrotyrosine, nitroarginine, pyroglutamic acid (Pyr). Peptides may also incorporate unnatural amino acids including, but not limited to, homo amino acids, N-methyl amino acids, alpha-methyl amino acids, beta (homo) amino acids, gamma amino acids, and N-substituted glycines. Peptides may be linear peptides or cyclic peptides.

[0075] The term “protein” shall be taken to include a single polypeptide chain, i.e., a series of contiguous amino acids linked by peptide bonds or a series of polypeptide chains covalently or non-covalently linked to one another (i.e., a polypeptide complex). For example, the series of polypeptide chains can be covalently linked using a suitable chemical bond or a disulfide bond. Examples of non-covalent bonds include hydrogen bonds, ionic bonds, Van der Waals forces, and hydrophobic interactions.

[0076] Percentage amino acid sequence identity with respect to a given amino acid sequence is defined as the percentage of amino acid residues in a candidate sequence that are identical to the amino acid residues in the reference sequence, after aligning the sequences and introducing gaps, if necessary, to achieve the maximum percent sequence identity, and not considering any conservative substitutions as part of the sequence identity. Amino acid sequence identity may be determined using the EMBOSS Pairwise Alignment Algorithms tool available from The European Bioinformatics Institute (EMBL-EBI), which is part of the European Molecular Biology Laboratory. This tool is accessible at the website located at www.ebi.ac.uk/Tools/emboss/align/. This tool utilizes the Needleman-Wunsch global alignment algorithm (Needleman and Wunsch, 1970). Default settings are utilized, which include Gap Open: 10.0 and Gap Extend 0.5. The default matrix “Blosum62” is utilized for amino acid sequences and the default matrix. Percent (%) or percentage “nucleic acid sequence identity” with respect to the nucleotide sequences disclosed herein is defined as the percentage of nucleotides in a candidate sequence that are identical with the nucleotides in the reference sequence, after aligning the sequences and introducing gaps, if necessary, to achieve the maximum percent sequence identity. Alignment for purposes of determining percent nucleic acid sequence identity can be achieved in various ways that are known in the art, for instance, using publicly available computer software such as BLAST or ALIGN. The skilled person can readily determine appropriate parameters for measuring alignment, including any algorithms needed to achieve maximal alignment over the full length of the sequences being compared.

[0077] The term “cell penetrating peptide” (CPP) refers to a peptide that is capable of crossing a cellular membrane. In one example, a CPP is capable of translocating across a mammalian cell membrane and entering into a cell. In another example, a CPP may direct a conjugate to a desired subcellular compartment. Thus, a CPP may direct or facilitate penetration of a molecule of interest across a phospholipid, mitochondrial, endosomal, lysosomal, vesicular, or nuclear membrane. A CPP may be translocated across the membrane with its amino acid sequence complete and intact, or alternatively partially degraded.

[0078] A CPP may direct a molecule of interest, such as an ASO disclosed herein, from outside a cell through the plasma membrane, and into the cytoplasm or a desired subcellular compartment. Alternatively, or in addition, a CPP may direct a molecule of interest across the blood-brain, trans-mucosal, hematoretinal, skin, gastrointestinal and/or pulmonary barriers.

[0079] The term “peptide ligand” or “receptor binding peptide” refers to a peptide that is capable of binding to a membrane surface receptor to enable transport of the peptide across a cellular membrane. In one example a peptide ligand may enable transport across the cellular membrane via the natural endocytosis of the targeted receptor. In another example the peptide ligand may utilise a complementary mechanism of transport across the cellular membrane including utilising a conjugated CPP. In one example, a peptide ligand is capable of translocating across a mammalian cell membrane and to enter a cell. In another example, a peptide ligand may direct a conjugate to a desired subcellular compartment. Thus, a peptide ligand may direct or facilitate cellular uptake of a molecule of interest across a phospholipid, mitochondrial, endosomal, lysosomal, vesicular, or nuclear membrane. A peptide ligand may be translocated across the membrane with its amino acid sequence complete and intact, or alternatively partially degraded.

[0080] A peptide ligand via its binding to a target receptor may direct a molecule of interest, such as an ASO disclosed herein, from outside a cell through the plasma membrane, and into the cytoplasm or a desired subcellular compartment. Alternatively, or in addition, a peptide ligand via its binding to a target receptor may direct a molecule of interest across a relevant biological barrier, e.g., the blood-brain, trans-mucosal, hematoretinal, skin, gastrointestinal, and/or pulmonary barriers.

### Compositions for Increasing SHANK3 Protein Levels

[0081] In the case of rare, monogenic diseases, the loss of one functional allele, e.g., SHANK3 allele, can result in haploinsufficiency and the associated disease.

[0082] While not wishing to be bound by theory, it is believed that ASOs can act by a number of mechanisms, including, but not limited to targeting sequences within the 3′ UTR of SHANK3 mRNA that can stabilize SHANK3 transcripts and/or net translation, e.g., by masking binding sites for miRNAs (e.g., a binding site for miR-504) located within the SHANK3 mRNA 3′ UTR to sterically hinder (“mask”) access of these miRNAs to their binding sites, thereby resulting in an increased level of SHANK3 mRNA and ultimately allowing increased translation of SHANK3 protein. Alternatively, alterations in the secondary structure of the 3′ UTR induced by ASO hybridization could also result in increased translation and/or stabilization of the targeted SHANK3 transcript.

[0083] Accordingly, disclosed herein is an ASO that binds within a targeted portion of the 3′ UTR of a SHANK3 mRNA; whereby binding of the antisense oligonucleotide within the targeted portion in a mammalian cell results in an increased level of SHANK3 protein in the mammalian cell.

[0084] For reference, the nucleotide sequence of the canonical human SHANK3 mRNA 3′ UTR is provided herein as SEQ ID NO:1 (provided in the Appendix). In some examples the targeted portion comprises the sequence according to SEQ ID NO:1079. In some examples the targeted portion consists of the sequence according to SEQ ID NO:1079 (provided in the Appendix).

### Antisense Oligonucleotides (ASOs) and Antisense RNAs (ARs)

[0085] In some examples of the compositions and methods described herein, ASOs and ARs have a sequence that is completely or nearly completely complementary across its length to the target sequence. ASOs and ARs are designed so that they bind (hybridize) to a target RNA sequence (e.g., a targeted portion of a mRNA transcript) and remain hybridized under physiological conditions. Selection of suitable sequences for ASOs and ARs generally avoids, where possible, similar nucleic acid sequences in other (i.e., off-target) locations in the genome or in cellular mRNAs or miRNAs, such that the likelihood the ASO or AR will hybridize at such sites is limited. In some examples, ASOs disclosed herein bind to a targeted region within the SHANK3 mRNA 3′ UTR.

[0086] In some examples, ASOs or ARs “specifically hybridize” to or are “specific” to a target nucleic acid or a targeted portion of a SHANK3 mRNA 3′ UTR. At a given ionic strength and pH, the Tₘ is the temperature at which 50% of a target sequence hybridizes to a complementary oligonucleotide.

[0087] ASO and AR sequences are “complementary” to their target sequences when hybridization occurs in an antiparallel configuration between two single-stranded polynucleotides. Complementarity is quantifiable in terms of the proportion (e.g., the percentage) of bases in opposing strands that are expected to form hydrogen bonds with each other, according to generally accepted base-pairing rules. The nucleotide sequence of an ASO or AR need not be 100% complementary to that of its target nucleic acid to hybridize. In certain examples, the nucleotide sequences of ASOs or ARs in the compositions disclosed herein can be at least 60%, at least 65%, at least 70%, at least 75%, at least 80%, at least 85%, at least 90%, at least 95%, at least 96%, at least 97%, at least 98%, or at least 99% sequence complementary to the nucleotide sequence of the targeted portion of an RNA transcript over the length of the ASO or AR nucleotide sequence. For example, an ASO or AR in which 18 of 20 nucleotides of ASO or AR sequence are complementary to a target region, and would therefore specifically hybridize, would represent 90 percent complementarity. In such an example, the remaining non-complementary nucleotides of the ASO or AR could be clustered together or interspersed with complementary nucleotides and need not be contiguous. Complementarity of an ASO or AR sequence to a target nucleotide sequence (expressed as “percent complementarity” to its target sequence; or “percent identity” to its reverse complement sequence) can be determined routinely using algorithms known in the art, as exemplified in the BLAST programs (basic local alignment search tools) and PowerBLAST programs (Altschul, et al., 1990, J Mol. Biol., 215:403-410; Zhang et al., 1997, Genome Res., 7:649-656).

[0088] In some examples, an ASO or AR does not hybridize to all nucleotides in a target sequence and the nucleotide positions at which it does hybridize may be contiguous or noncontiguous. ASOs or ARs may hybridize over one or more segments of a SHANK3 mRNA 3′ UTR such that intervening or adjacent segments (e.g., one or more abasic spacer subunits) are not involved in the hybridization event (e.g., a loop structure or hairpin structure may be formed).

[0089] In some examples the nucleotide sequence of the ASO or the AR is at least 60%, 65%, 70%, 75%, 80%, 85%, 90%, 95%, or 100% complementary to the nucleotide sequence of the targeted portion of the SHANK3 mRNA over the length of the ASO or the AR. In some examples the nucleotide sequence of the ASO or the AR comprises a sequence that: (a) has at least about 40% identity to about 60% identity of the nucleotide sequence of an ASO or AR sequence disclosed herein, e.g., 45% identity, 48% identity, 50% identity, 52% identity, 55% identity, 58% identity or another sequence identity from about 40% identity to about 60% identity to the entire length of the sequence of any ASO or AR disclosed herein; and (b) comprises a contiguous sequence of at least 8 bases to 16 bases that is 100% identical to a contiguous sequence of at least 8 to 16 bases in any one of the ASO or AR sequences disclosed herein, e.g., 100% sequence-identical to a contiguous 9 bases, 10 bases, 11 bases, 12 bases, 13 bases, 14 bases, 15 bases, or 16 bases of an ASO or AR sequence disclosed herein. The ASOs or ARs for use in the compositions described herein may be of any length suitable for specific hybridization to a target sequence. In some examples, the nucleotide sequence of the ASOs or ARs consist of 8 to 50 nucleotides. For example, the ASO or AR sequence can be 10, 11, 12, 13, 14, 15, 16, 17, 18, 19, 20, 21, 22, 23, 24, 25, 26, 27, 28, 29, 30, 31, 32, 33, 34, 35, 40, 45, or 50 nucleotides in length. In some examples, the nucleotide sequence of the ASOs or ARs consist of 8 to 50 nucleotides. For example, the ASO or AR sequence can be 10, 11, 12, 13, 14, 15, 16, 17, 18, 19, 20, 21, 22, 23, 24, 25, 26, 27, 28, 29, 30, 31, 32, 33, 34, 35, 40, 45, or 50 nucleotides in length. In some examples, the ASOs consist of more than 50 nucleotides, but no more than 100 nucleotides in length. In some examples, the ASO or AR nucleotide sequence is from 8 to 50 nucleotides, 8 to 40 nucleotides, 8 to 35 nucleotides, 8 to 30 nucleotides, 8 to 25 nucleotides, 8 to 20 nucleotides, 8 to 15 nucleotides, 9 to 50 nucleotides, 9 to 40 nucleotides, 9 to 35 nucleotides, 9 to 30 nucleotides, 9 to 25 nucleotides, 9 to 20 nucleotides, 9 to 15 nucleotides, 10 to 50 nucleotides, 10 to 40 nucleotides, 10 to 35 nucleotides, 10 to 30 nucleotides, 10 to 25 nucleotides, 10 to 20 nucleotides, 10 to 15 nucleotides, 11 to 50 nucleotides, 11 to 40 nucleotides, 11 to 35 nucleotides, 11 to 30 nucleotides, 11 to 25 nucleotides, 11 to 20 nucleotides, 11 to 15 nucleotides, 12 to 50 nucleotides, 12 to 40 nucleotides, 12 to 35 nucleotides, 12 to 30 nucleotides, 12 to 25 nucleotides, 12 to 20 nucleotides, 12 to 15 nucleotides, 13 to 50 nucleotides, 13 to 40 nucleotides, 13 to 35 nucleotides, 13 to 30 nucleotides, 13 to 25 nucleotides, 13 to 20 nucleotides, 14 to 50 nucleotides, 14 to 40 nucleotides, 14 to 35 nucleotides, 14 to 30 nucleotides, 14 to 25 nucleotides, 14 to 20 nucleotides, 15 to 50 nucleotides, 15 to 40 nucleotides, 15 to 35 nucleotides, 15 to 30 nucleotides, 15 to 25 nucleotides, 15 to 20 nucleotides, 17 to 30 nucleotides, 17 to 25 nucleotides, 17 to 20 nucleotides, 20 to 50 nucleotides, 20 to 40 nucleotides, 20 to 35 nucleotides, 20 to 30 nucleotides, 20 to 25 nucleotides, 25 to 50 nucleotides, 25 to 40 nucleotides, 25 to 35 nucleotides, or 25 to 30 nucleotides in length. In some examples, the ASOs or ARs are 17 nucleotides in length. In other examples, the ASOs or ARs are 20 nucleotides in length. In some examples, the nucleotide sequence of the ASO or AR nucleotide is 25 nucleotides in length.

[0090] In other examples the ASOs or ARs comprise at least 10 contiguous nucleotides of an ASO or AR sequence described herein. In some examples ASOs or ARs comprise at least 10 contiguous nucleotides (subsequence) from each of two or more ASO or AR sequences described herein, where the two or more subsequences are not contiguous in a SHANK3 mRNA sequence.

[0091] In some examples for each occurrence of “G” in an ASO or AR sequence disclosed herein, the “G” is guanosine or inosine. In some examples for each occurrence of “T” in an ASO or AR sequence disclosed herein, the “T” is any one of: thymidine, inosine, uracil, or an isomeric or modified form of uracil (e.g., pseudouridine or N1-methyl-pseudouridine). In some examples for each occurrence of “C” in an ASO or AR sequence disclosed herein, the C is cytosine or a modified form of cytosine (e.g., 5′-methyl cytosine).

[0092] In some examples the nucleotide sequence of the ASO corresponds to any one of SEQ ID NOs:1080-1093 or 1096-1133. In some examples the nucleotide sequence of the ASO corresponds to any one of SEQ ID NOs:1080-1093. In some examples the nucleotide sequence of the ASO corresponds to any one of SEQ ID NOs:1084, 1087, or 1091-1093. In some examples the nucleotide sequence of the ASO corresponds to SEQ ID NO:1084. In some examples the nucleotide sequence of the ASO corresponds to SEQ ID NO:1087. In some examples the nucleotide sequence of the ASO corresponds to SEQ ID NO:1091. In some examples the nucleotide sequence of the ASO corresponds to SEQ ID NO:1092. In some examples the nucleotide sequence of the ASO corresponds to SEQ ID NO:1093.

[0093] In some examples any of the foregoing ASOs include a backbone modification. In some examples the backbone modification includes a phosphorothioate linkage or a phosphorodiamidate linkage. In other examples the ASO includes a phosphorodiamidate morpholino, an arabinonucleic acid, a locked nucleic acid, a peptide nucleic acid, a 2′-O-modification such as a 2′-O-methyl, a 2′-Fluoro, or a 2′-O-methoxyethyl moiety, or an abasic spacer subunit. In some examples the abasic spacer subunit comprises the structure according to Formula I.

[chemical structure]

[0094] In some examples the nucleotide sequence of the ASO comprises one or more abasic spacer subunit and/or one or more locked nucleic acids (LNAs). In some examples the nucleotide sequence of the ASO comprises one or more abasic spacer subunits and one or more LNAs. In some examples, where the ASO comprises at least one abasic spacer subunit, at least one locked nucleic acid, or both, the nucleotide sequence of the ASO corresponds to any one of SEQ ID NOs:1096-1133.

[0095] In some examples the ASO includes at least one modified sugar moiety. In other examples each sugar moiety in the ASO is a modified sugar moiety. In some examples the ASO includes a 2′-O-methoxyethyl moiety. In other examples each nucleotide of the ASO includes a 2′-O-methoxyethyl moiety.

[0096] In some examples the nucleotide sequence of the ASO or AR comprises the sequence of any one of SEQ ID NOs:3-1078. In some examples the nucleotide sequence of the ASO or AR comprises the sequence of SEQ ID NO:160 or SEQ ID NO:687. In some examples the nucleotide sequence of the ASO or AR comprises the sequence of SEQ ID NO:160. In some examples the nucleotide sequence of the ASO or AR comprises the sequence of SEQ ID NO:687. In some examples the nucleotide sequence of the ASO comprises the nucleotide sequence of SEQ ID NO:160. In other examples the nucleotide sequence of the ASO comprises the nucleotide sequence of SEQ ID NO:160.

[0097] In some examples the nucleotide sequence of the ASO or AR consists of the nucleotide sequence of any one of SEQ ID NOs:3-1078. In some examples the nucleotide sequence of the ASO or AR consists of the nucleotide sequence of SEQ ID NO:160 or SEQ ID NO:687. In some examples the nucleotide sequence of the ASO or AR consists of SEQ ID NO:160. In some examples the nucleotide sequence of the ASO or AR consists of SEQ ID NO:687. In some examples the nucleotide sequence of the ASO consists of SEQ ID NO:160. In some examples the nucleotide sequence of the ASO consists of SEQ ID NO:687. Sequences for the foregoing SEQ ID NOs are provided in Tables 1-3 in the Appendix.

### ASO Chemistry and Modifications

[0098] The ASOs used in the compositions described herein may comprise naturally-occurring nucleotides, nucleotide analogues, modified nucleotides, or any combination thereof. The term “naturally occurring nucleotides” includes deoxyribonucleotides and ribonucleotides. The term “modified nucleotides” includes nucleotides with modified or substituted sugar groups and/or having a modified backbone. In some examples, all the nucleotides of an ASO are modified nucleotides. Chemical modifications of ASOs or components of ASOs that are compatible with the compositions and methods described herein are known in the art as disclosed in, e.g., in U.S. Pat. Nos. 8,258,109, 5,656,612, U.S. Patent Publication No. 2012/0190728, and Roberts et al., 2020, Nature Rev. Drug Disc., 19:673-694.

[0099] One or more nucleotides of an ASO may be any naturally occurring, unmodified nucleobase such as adenine, guanine, cytosine, thymine, uracil and inosine, or any synthetic or modified nucleobase that is sufficiently similar to an unmodified nucleobase such that it is capable of hydrogen bonding with a nucleobase present on a target RNA transcript. Examples of suitable modified nucleobases include, but are not limited to, hypoxanthine, xanthine, 7-methylguanine, 5, 6-dihydrouracil, 5-methylcytosine, and 5-hydroxymethylcytosine.

[0100] In some examples an ASO includes 1, 2, or 3 abasic spacer subunits, residues that comprise a sugar backbone but do not include a nucleobase, interspersed at various positions within an ASO sequence. Abasic “spacer” subunits and their use in oligonucleotides is described in, e.g., PCT/US2022/044995. In some preferred examples the abasic spacer subunit comprises the structure according to Formula I:

[chemical structure]

[0101] In some examples an abasic spacer subunit comprises the structure according to Formula II:

[chemical structure]

[0102] In some examples an ASO disclosed herein includes 1-3 abasic spacer subunits and 1-3 locked nucleic acid subunits.

[0103] ASOs include a “backbone” structure, that refers to the connection between nucleotides/monomers of the ASO. In naturally occurring oligonucleotides, the backbone comprises a 3′-5′ phosphodiester linkage connecting sugar moieties of adjacent nucleotides. Suitable types of backbone linkages for the ASOs described herein include, but are not limited to, phosphodiester, phosphorothioate, phosphorodithioate, phosphorodiamidate, phosphoroselenoate, phosphorodiselenoate, phosphoroanilothioate, phosphoraniladate, phosphoramidate, and the like. In some examples, the backbone modification is a phosphorothioate linkage. In other examples, the backbone modification is a phosphorodiamidate linkage. See, e.g., Roberts et al. supra; and Agrawal (2021), Biomedicines, 9:503. In some examples, the backbone structure of the ASO does not contain phosphorous-based linkages, but rather contains peptide bonds, for example in a peptide nucleic acid (PNA), or linking groups including carbamate, amides, and linear and cyclic hydrocarbon groups.

[0104] In some examples, the stereochemistry at each of the phosphorus internucleotide linkages of the ASO backbone is random. In other examples, the stereochemistry at each of the phosphorus internucleotide linkages of the ASO backbone is controlled and is not random. For example, U.S. Pat. No. 9,605,019 describes methods for independently selecting the handedness of chirality at each phosphorous atom in an oligonucleotide. In some examples, an ASO used in the compositions and methods provided herein, including, but not limited to, the ASOs the sequences of which are disclosed herein as SEQ ID NOs:1080-1093, 1096-1133, SEQ ID NOs:3-1078 (e.g., SEQ ID NO:160 or SEQ ID NO:687), and SEQ ID NOs: 1080-1133. In some examples, a composition or composition used in the methods disclosed herein comprises a pure diastereomeric ASO. In other examples, the composition comprises an ASO that has diastereomeric purity of at least about 90%, at least about 91%, at least about 92%, at least about 93%, at least about 94%, at least about 95%, at least about 96%, at least about 97%, at least about 98%, at least about 99%, about 100%, about 90% to about 100%, about 91% to about 100%, about 92% to about 100%, about 93% to about 100%, about 94% to about 100%, about 95% to about 100%, about 96% to about 100%, about 97% to about 100%, about 98% to about 100%, or about 99% to about 100%.

[0105] In some examples, the ASO has a non-random mixture of Rp and Sp configurations at its phosphorus internucleotide linkages. In some examples, an ASO used in the compositions and methods disclosed herein, comprises about 5-100% Rp, at least about 5% Rp, at least about 10% Rp, at least about 15% Rp, at least about 20% Rp, at least about 25% Rp, at least about 30% Rp, at least about 35% Rp, at least about 40% Rp, at least about 45% Rp, at least about 50% Rp, at least about 55% Rp, at least about 60% Rp, at least about 65% Rp, at least about 70% Rp, at least about 75% Rp, at least about 80% Rp, at least about 85% Rp, at least about 90% Rp, or at least about 95% Rp, with the remainder Sp, or about 100% Rp.

[0106] In some examples, the ASOs described herein contain a sugar moiety that comprises ribose or deoxyribose, or a modified sugar moiety or sugar analogue, including a morpholine ring. Suitable examples of modified sugar moieties include, but are not limited to, 2′ substitutions such as 2′-O-modifications, 2′-O-methyl (2′-O-Me), 2′-O-methoxyethyl (2′MOE), 2′-O-aminoethyl, 2′F, N3′->P5′ phosphoramidate, 2′dimethylaminooxyethoxy, 2′dimethylaminoethoxyethoxy, 2′-guanidinidium, 2′-O-guanidinium ethyl, 2′-deoxy-2′-fluoroarabinonucleic acid (2′FANA), carbamate modified sugars, and bicyclic modified sugars. In some examples, the sugar moiety modification is selected from among 2′-O-Me, 2′F, and 2′MOE. In other examples, the sugar moiety modification is an extra bridge bond, such as in a locked nucleic acid (LNA). In some examples the sugar analogue contains a morpholine ring, such as phosphorodiamidate morpholino (PMO). In some examples, the sugar moiety comprises a ribofuransyl or 2′deoxyribofuransyl modification. In some examples, the sugar moiety comprises 2′4′-constrained 2′-O-methyloxyethyl (cMOE) modifications. In some examples, the sugar moiety comprises cEt 2′, 4′ constrained 2′-O ethyl BNA modifications. In other examples, the sugar moiety comprises tricycloDNA (tcDNA) modifications. In some examples, the sugar moiety comprises ethylene nucleic acid (ENA) modifications. In some examples, the sugar moiety comprises 2′-O-(2-N-methylcarbamoylethyl) (MCE). Modifications are known in the art as exemplified in Jarver, et al., 2014, Nucleic Acid Therapeutics, 24(1): 37-47.

[0107] In some examples, each constituent nucleotide of the ASO is modified in the same way, e.g., every linkage of the backbone of the ASO comprises a phosphorothioate linkage, or each ribose sugar moiety comprises a 2′-O-methyl modification. In other examples, a combination of different modifications is used, e.g., an ASO comprising a combination of phosphorodiamidate linkages and sugar moieties comprising morpholine rings (morpholinos).

[0108] In some examples, the ASO comprises one or more backbone modifications. In some examples, the ASO comprises one or more sugar moiety modification. In some examples, the ASO comprises one or more backbone modifications and one or more sugar moiety modifications. In some examples, the ASO comprises a 2′MOE modification and a phosphorothioate backbone. In some examples, the ASO comprises a peptide nucleic acid (PNA).

[0109] In some preferred examples, the ASO comprises a phosphorodiamidate morpholino (PMO).

[0110] The skilled person in the art will appreciate that ASOs may be modified in order to achieve desired properties or activities of the ASO or reduce undesired properties or activities of the ASO. In some examples, an ASO is modified to alter one or more properties. For example, such modifications can: enhance binding affinity to a target sequence on a pre-mRNA transcript; reduce binding to any non-target sequence; reduce degradation by cellular nucleases (e.g., RNase H); improve uptake of an ASO into a cell and/or particular subcellular compartments; alter the pharmacokinetics or pharmacodynamics of the ASO; and/or modulate the half-life of the ASO in vivo.

[0111] In some examples, the ASOs comprise one or more 2′-O-(2-methoxyethyl) (MOE) phosphorothioate-modified nucleotides, which have been shown to confer significantly enhanced resistance of ASOs to nuclease degradation and increased bioavailability.

[0112] In some examples the ASOs comprise one or more abasic spacer subunits, which may reduce off-target hybridization of the ASO.

[0113] Methods for synthesis and chemical modification of ASOs, as well as synthesis of ASO conjugates is well known in the art, and such ASOs are available commercially.

[0114] In some examples, a composition (e.g., a pharmaceutical composition) provided here includes two or more ASOs with different chemistries but complementary to the same targeted portion of the SHANK3 mRNA 3′ UTR. In other examples, a composition comprises two or more ASOs that are complementary to different targeted portions of the 3′ UTR.

[0115] In some examples, the compositions disclosed herein include ASOs that are linked to a functional moiety. In some examples, the functional moiety is a delivery moiety, a targeting moiety, a detection moiety, a stabilizing moiety, or a therapeutic moiety. In some examples the functional moiety includes a delivery moiety or a targeting moiety. In some examples the functional moiety includes a stabilizing moiety. In some preferred examples the functional moiety is a delivery moiety.

[0116] Suitable delivery moieties include, but are not limited to, lipids, polyethers, peptides, carbohydrates, glycans, receptor binding peptide (RBP), and antibodies.

[0117] In some examples, the delivery moiety includes a cell-penetrating peptide (CPP). Suitable examples of CPPs are described in, e.g., PCT/AU2020/051397. In some examples the amino acid sequence of the CPP comprises or consists of: RRSRTARAGRPGRNSSRPSAPR (SEQ ID NO:2). In other examples, the delivery moiety includes a RBP.

[0118] In other examples, the delivery moiety includes a carbohydrate. In some examples, a carbohydrate delivery moiety is selected from among N-acetylgalactosamine (GalNAc), N-Ac-Glucosamine (GluNAc), glycan, and a mannose. In one example, the carbohydrate delivery moiety comprises GalNac or a glycan moiety.

[0119] In other examples, the delivery moiety includes a lipid. In some examples the lipid contains saturated acids. In some examples the lipid contains unsaturated acids. In some examples the lipid contains saturated and unsaturated acids. Examples of suitable lipids as delivery moieties include, but are not limited to, cholesterol moiety, a cholesteryl moiety, and aliphatic lipids. In some examples the delivery moiety includes a fatty acid or lipid moiety. In some embodiments the fatty acid chain length is about C8 to C20. Examples of suitable fatty acid moieties and their conjugation to oligonucleotides are found in, e.g., International Patent Publication WO 2019232255 and in Prakash et al., (2019).

[0120] In further examples, the delivery moiety includes an antibody, as described in, e.g., Dugal-Tessier et al., (2021).

[0121] Suitable examples of stabilizing moieties include, but are not limited to, polyethylene glycol (PEG), poly(oligo(ethylene glycol) methyl ether methacrylate) (POEGMA), and Poly(2-oxazoline)s (POx).

[0122] In some examples, where an ASO is linked to a functional moiety, the functional moiety is covalently linked to the ASO. In other examples, the functional moiety is non-covalently linked to the ASO.

[0123] Functional moieties can be linked to one or more of any nucleotides in an ASO at any of several positions on the sugar, base or phosphate group, as understood in the art and described in the literature, e.g., using a linker. Linkers can include a bivalent or trivalent branched linker. In some examples, the functional moiety is linked to the 5′ end of the ASO. In other examples, the functional moiety is linked to the 3′ end of the ASO.

[0124] In some examples compositions comprising any of the ASOs disclosed herein also include a delivery nanocarrier complexed with ASO. In some examples, a delivery nanocarrier is selected from among lipoplexes, liposomes, exosomes, inorganic nanoparticles, and DNA nanostructures. In other examples the delivery nanocarrier includes a lipid nanoparticle encapsulating the ASO. Various delivery ASO-nanocarrier complex formats are known in the art, as reviewed in, e.g., Roberts et al., supra.

### Vectors for Expression of SHANK3 Antisense RNA (AR)

[0125] In some examples provided herein is a vector for expression, in a mammalian neuron or other cell type, of an antisense RNA (AR) that binds within a targeted portion of the 3′ UTR of a SHANK3 mRNA; whereby binding of the AR within the targeted portion in a mammalian cell results in an increased level of SHANK3 protein in the mammalian cell.

[0126] In some examples, the promoter used in the expression vector is a neuron type-selective promoter for driving expression of the AR in the mammalian cell. In some examples, the neuronal cell type-selective promoter is selective for expression in neurons selected from the list consisting of. cortical, striatal, cerebellar and hippocampal excitatory or inhibitory neurons, including, but not limited to cortical glutamatergic neurons, cortical GABAergic neurons, hippocampal glutamatergic neurons, and striatal inhibitory neurons.

[0127] In some the promoter is an inducible promoter, e.g., inducible by a ligand-regulated transactivator such as the tet-inducible rtTA, which allows titration of AR transcription in a target mammalian cell. In some examples, the promoter driving AR expression is a U6 or other Pol III promoter, which is particularly suitable for transcription of short RNA sequences such AR sequences disclosed herein. In some examples, an expression vector utilizes hybrid promoter systems, e.g., a Tet-O-regulated U6 promoter system as described in Lin et al. (2004), FEBS Letters, 577 (2004) 376-380. In some examples, where both cell type-specificity and inducibility of an AR expression vector are desired, a two-part expression system is used in which expression of a ligand-regulated transactivator is driven by a cell type-selective promoter and expression of an AR disclosed herein is driven by a promoter regulated by the ligand-regulated transactivator.

[0128] In some examples, the expression vectors used in the compositions disclosed herein are non-viral expression vectors, e.g., plasmid vectors, minicircle DNA vectors, linear amplicon expression cassettes, and the like.

[0129] In some examples, composition containing a non-viral expression virus further comprises a transfection agent. Exemplary transfection agents for transfection include, but are not limited to, jet-PEI® (available from Polyplus-Transfection® SA, Strasbourg, France); TurboFect in vivo Transfection Reagent (ThermoFisher), and cationic derivatives of polyisoprenoid alcohols (PTAI) as described in, e.g., Rak et al., (2016).

[0130] In other examples, the expression vectors to be used are viral vectors, i.e., non-replicative recombinant viruses suitable for expression of an AR disclosed herein.

[0131] Preferably, the recombinant virus for expression of the SHANK3 AR is a DNA virus. Suitable types of DNA viruses include adeno-associated virus (AAV), adenovirus, lentivirus, herpes simplex virus (HSV), and anelloviruses. Methods for design, production, and use of such types of recombinant DNA viruses are established in the art, as exemplified in Fukazawa et al., (2010), International J of Mol. Med, 25(1), 3-10, and in “Gene Therapy Protocols” for adenovirus; “Adeno-Associated Virus: Methods and Protocols” for AAV; Cody et al (2013), Journal of Genetic Syndromes & Gene Therapy, 4(1), 126, and “Herpes Simplex Virus: Methods and Protocols” for HSV; “Gene Therapy Protocols Vol. 1: Production and In Vivo Applications of Gene Transfer Vectors”; and Merten et al. (2016), Molecular Therapy—Methods & Clinical Development, 3, 16017, and Emeagi et al. (2013), Current Molecular Medicine 13(4), 602-625 for lentivirus. In some preferred examples, the viral vector is a recombinant AAV.

### Genetically Modified Cells

[0132] Also provided herein are genetically modified cells. In some examples the genetically modified cells are genetically modified bacterial cells (e.g., recombinant E. coli, for amplifying an AR expression vector disclosed herein). In other examples the genetically modified cells are mammalian cells that become genetically modified by virtue of the fact that they have been transfected with any of the ASOs or non-viral AR expression vectors; or transduced with any of the viral AR expression vectors disclosed herein. In some examples, the genetically modified mammalian cells are ex vivo, e.g., as a cultured cell population. In other examples, the genetically modified mammalian cells are in vivo, e.g., in a mouse. In some examples, the genetically modified mammalian cells are human cells.

[0133] In some examples the genetically modified mammalian cells are neurons or neural progenitors. Suitable examples of neurons include, but are not limited to, cortical, striatal, cerebellar and hippocampal excitatory or inhibitory neurons, including, but not limited to cortical glutamatergic neurons, cortical GABAergic neurons, hippocampal glutamatergic neurons, and striatal inhibitory neurons. In some examples such primary cell types can be obtained by differentiation of a human pluripotent stem cell line, e.g., an hiPSC line or a human embryonic stem cell (hESC) line. Methods for obtaining a variety of different neuronal cell types is known in the art, as reviewed in, e.g., Alia et al., (2019), Fitzgerald et al., (2020) and Kim et al., (2014). In other examples, the genetically modified mammalian cells are derived from a cell line. In some examples the cell line is pluripotent stem cell line (e.g., hiPSCs or hESCs) or a neuronal cell line. Suitable neuronal or neuronal stem cell lines include, but are not limited to, SH-SY5Y, NTera, CTXOE16, ReNcell VM, ReNcell Cx. In some preferred examples, the genetically modified mammalian cells express SHANK3 endogenously.

[0134] The genetically modified cells disclosed herein can be genetically modified by any of a number of methods and strategies known in the art, e.g., transient transfection, stable transfection, and viral transduction. In some examples transfection with ASOs or non-viral vectors is carried out by nucleofection. In other examples transfection of cells is by lipofection.

### Pharmaceutical Compositions

[0135] Also provided herein are pharmaceutical compositions comprising any of the foregoing ASOs, non-viral expression vectors, and viral expression vectors disclosed herein, and formulated with at least a pharmaceutically acceptable excipient, including a carrier, filler, preservative, adjuvant, solubilizer and/or diluent.

[0136] Pharmaceutical compositions containing any of the ASOs or expression vector compositions described herein, for use in the methods disclosed herein, can be prepared according to conventional techniques well known in the pharmaceutical industry and described in the published literature. In some examples, a pharmaceutical composition for treating a subject comprises a therapeutically effective amount of any ASO or expression vector disclosed herein.

[0137] Pharmaceutically acceptable salts are suitable for use in contact with the tissues of humans and lower animals without undue toxicity, irritation, allergic response, etc., and are commensurate with a reasonable benefit/risk ratio. Examples of pharmaceutically acceptable, nontoxic acid addition salts are salts of an amino group formed with inorganic acids such as hydrochloric acid, hydrobromic acid, phosphoric acid, sulfuric acid and perchloric acid or with organic acids such as acetic acid, oxalic acid, maleic acid, tartaric acid, citric acid, succinic acid or malonic acid. Other pharmaceutically acceptable salts include adipate, alginate, ascorbate, aspartate, benzenesulfonate, benzoate, bisulfate, borate, butyrate, camphorate, camphorsulfonate, citrate, cyclopentanepropionate, digluconate, dodecylsulfate, ethanesulfonate, formate, fumarate, glucoheptonate, glycerophosphate, gluconate, hemisulfate, heptanoate, hexanoate, hydroiodide, 2-hydroxy-ethanesulfonate, lactobionate, lactate, laurate, lauryl sulfate, malate, maleate, malonate, methanesulfonate, 2-naphthalenesulfonate, nicotinate, nitrate, oleate, oxalate, palmitate, pamoate, pectinate, persulfate, 3-phenylpropionate, phosphate, picrate, pivalate, propionate, stearate, succinate, sulfate, tartrate, thiocyanate, p-toluenesulfonate, undecanoate, valerate salts, and the like. Representative alkali or alkaline earth metal salts include sodium, lithium, potassium, calcium, magnesium, and the like. Further pharmaceutically acceptable salts include, when appropriate, nontoxic ammonium, quaternary ammonium, and amine cations formed using counterions such as halide, hydroxide, carboxylate, sulfate, phosphate, nitrate, lower alkyl sulfonate and aryl sulfonate.

[0138] In some examples, pharmaceutical compositions are formulated into any of a number of possible dosage routes or forms including, but not limited to, intravenous administration, intrathecal administration magna administration, tablets, capsules, gel capsules, liquid syrups, and soft gels. In some examples, the compositions are formulated as suspensions in aqueous, non-aqueous or mixed media. Aqueous suspensions may further contain substances that increase the viscosity of the suspension including, for example, sodium carboxymethylcellulose, sorbitol and/or dextran. The suspension may also contain stabilizers. In some examples, a pharmaceutical formulation disclosed herein is provided in a form including, but not limited to, a solution, emulsion, microemulsion, foam or liposome-containing formulation (e.g., cationic or noncationic liposomes).

[0139] In some examples, pharmaceutical formulations comprising any of the ASOs or expression vectors described herein may comprise one or more penetration enhancers, carriers, excipients or other active or inactive ingredients as appropriate and known to the skilled person. In some examples, where a pharmaceutical composition includes liposomes, such liposomes can also include sterically stabilized liposomes, e.g., liposomes comprising one or more specialized lipids. These specialized lipids result in liposomes with enhanced circulation lifetimes. In some examples, a sterically stabilized liposome comprises one or more glycolipids or is derivatized with one or more hydrophilic polymers, such as PEG moiety. In some examples, a surfactant is included in the pharmaceutical formulation.

[0140] In some examples, a pharmaceutical composition also includes a penetration enhancer to enhance the delivery of ASOs or non-viral expression vectors, e.g., to aid diffusion across cell membranes and/or enhance the permeability of a lipophilic drug. In some examples, the penetration enhancers include a surfactant, a fatty acid, a bile salt, or a chelating agent.

[0141] In some examples, where administration is via a systemic route, e.g., intravenous, the method also includes a step to facilitate transfer of any of the ASOs or vectors described herein across the blood brain barrier (BBB) into the CNS, and especially into the brain. In some examples the BBB is transiently disrupted, e.g., by administration of one or more antibodies that disrupt Netrin-1 binding to Unc5B as described in Boye et al., (2022).

[0142] In some examples, a pharmaceutical composition comprises a dose of ASOs or non-viral vectors ranging from about 0.01 mg/kg to 20 mg/kg, e.g., 0.05 mg/kg, 0.1 mg/kg, 0.2 mg/kg, 0.5 mg/kg, 1 mg/kg, 3 mg/kg, 5 mg/kg, 8 mg/kg, 10 mg/kg, 15 mg/kg, or another dose ranging from about 0.01 mg/kg to 20 mg/kg. In some examples, where an ASO disclosed herein is to be administered directly into the CNS or brain, e.g., by intracerebroventricular administration, the total dose ranges from about 50 mg to about 500 mg, e.g., 60 mg, 70 mg, 80 mg, 100 mg, 120 mg, 150 mg, 180 mg, 200 mg, 220 mg, 250 mg, 270 mg, 290 mg, 300 mg, 350 mg, 400 mg, 450 mg, or another dose from about 50 mg to about 500 mg. This dose range corresponds to approximately 0.050 mg/cm³ of brain volume to about 0.42 mg/cm³ of brain volume assuming an average human brain volume of about 1200 cm³.

[0143] In some examples, a pharmaceutical composition comprises multiple ASOs or AR expression vectors. In some examples, a pharmaceutical composition comprises, in addition to ASOs or AR expression vectors, another drug or therapeutic agent suitable for treatment of a subject suffering from SHANK3 haploinsufficiency.

### Methods

[0144] As described herein, a number of conditions (e.g., Phelan-McDermid syndrome) are associated with insufficient levels of functional SHANK3. Accordingly, the methods described herein include a method for preventing or treating a condition associated with SHANK3 haploinsufficiency by administering to the subject a therapeutically effective amount of a pharmaceutical composition comprising any of the ASOs or expression vectors disclosed herein. Likewise, in some examples, any of the ASOs or AR expression vectors disclosed herein are used in the manufacture of a medicament for treating a condition associated with SHANK3 haploinsufficiency. In some examples the condition associated with SHANK3 haploinsufficiency to be prevented or treated by the methods or with the compositions disclosed herein is Phelan-McDermid syndrome, an autism spectrum disorder, schizophrenia, or an intellectual disability. In some preferred examples, the condition is Phelan-McDermid syndrome.

[0145] Also provided herein is a method for increasing the amount of functional SHANK3 protein in a mammalian cell expressing SHANK3 mRNA, the method comprising contacting the cell with any of the ASOs or expression vectors disclosed herein.

[0146] In some examples, administration to a subject or contact with cells in vitro or ex vivo with any of the ASOs, AR expression vectors, or pharmaceutical compositions disclosed herein increases the level of SHANK3 protein about 1.1 to about 5 fold in cells (e.g., neurons) in vitro or ex vivo, e.g., 1.2 fold, 1.3 fold, 1.5 fold, 1.7 fold, 2 fold, 2.2 fold, 2.5 fold, 2.7 fold, 3 fold, 3.3 fold, 3.5 fold, 4 fold, 4.3 fold, 4.5 fold, 4.7 fold, or another increase in SHANK3 protein levels from about 1.1 fold to about 5 fold in cells in a subject or in vitro or in vivo.

[0147] Suitable routes of administration for treatment with the compositions, pharmaceutical compositions, or medicaments disclosed herein include, but are not limited to, intravenous, intra-arterial, intraparenchymal, intracerebroventricular, intra-cistema magna, intrathecal, intravenous, intra-arterial, subcutaneous, and topical.

[0148] As the skilled person will understand, the treatment methods disclosed herein include administration of the compositions and pharmaceutical compositions disclosed herein in a therapeutically effective amount to a subject (e.g., a human subject). The terms “effective amount” or “therapeutically effective amount,” as used herein, refer to a sufficient amount of a disclosed ASO, non-viral or viral expression vector being administered to relieve to some extent one or more of the symptoms and/or clinical indicia associated with SHANK3 haploinsufficiency in a particular disease or health condition. In some examples, an “effective amount” for therapeutic uses is the amount of one of the foregoing agents required to provide a clinically significant decrease in disease symptoms to prevent disease symptoms without undue adverse side effects. Examples of suitable symptoms to be reduced by the treatment methods provided herein included, but are not limited to, seizures, anxiety, repetitive behaviors, learning and memory deficits, and impaired sociability. An appropriate “effective amount” in any individual case may be determined using techniques, such as a dose escalation study. The term “therapeutically effective amount” includes, for example, a prophylactically effective amount. It is understood that “an effective amount” or “a therapeutically effective amount” can vary from subject to subject, due to variation in metabolism of the compound of any age, weight, general condition of the subject, the condition being treated, the severity of the condition being treated, and the judgment of the prescribing physician. By way of example only, therapeutically effective amounts may be determined by routine experimentation, including but not limited to a dose escalation clinical trial. Where more than one therapeutic agent is used in combination, a “therapeutically effective amount” of each therapeutic agent can refer to an amount of the therapeutic agent that would be therapeutically effective when used on its own, or may refer to a reduced amount that is therapeutically effective by virtue of its combination with one or more additional therapeutic agents.

### Combination Treatments

[0149] The pharmaceutical compositions comprising any of the ASOs or AR expression vectors, disclosed herein, can also be used in combination with other agents of therapeutic value in the treatment of a condition associated with SHANK3 haploinsufficiency. In general, other agents do not necessarily have to be administered in the same pharmaceutical composition, and may, because of different physical and chemical characteristics, preferably be administered by different routes. The determination of the mode of administration and the advisability of administration, where possible, in the same pharmaceutical composition, is well within the knowledge of the skilled clinician. The initial administration can be made according to established protocols known in the art, and then, based upon the observed effects, the dosage, modes of administration and times of administration can be modified by the skilled clinician.

[0150] Compositions and pharmaceutical compositions comprising ASOs and/or expression vectors, and an additional therapeutic agent may be administered concurrently (e.g., simultaneously, essentially simultaneously or within the same treatment protocol) or sequentially, depending upon the stage and progression of the SHANK3 haploinsufficiency-associated condition to be treated, the condition of the patient, and the choice of specific therapeutic agents used. The determination of the order of administration, and the number of repetitions of administration of each therapeutic agent during a treatment protocol, is well within the knowledge of the skilled physician after evaluation of the disease being treated and the condition of the patient.

[0151] It is known to those of skill in the art that therapeutically-effective dosages can vary when the drugs are used in treatment combinations. Methods for experimentally determining therapeutically-effective dosages of drugs and other agents for use in combination treatment regimens are described in the literature. For example, the use of metronomic dosing, i.e., providing more frequent, lower doses in order to minimize toxic side effects, has been described extensively in the literature. Combination treatment further includes periodic treatments that start and stop at various times to assist with the clinical management of the patient.

[0152] For combination therapies, dosages of co-administered therapeutic agents will of course vary depending on the type of co-agents employed, ASO or expression vector, and the disease stage of the patient to be treated.

[0153] Pharmaceutical compositions comprising ASOs, ARs, or expression vectors, and an additional therapeutic agent that make up a combination therapy disclosed herein may be a combined dosage form or in separate dosage forms intended for substantially simultaneous administration. The pharmaceutical compositions that make up the combination therapy may also be administered sequentially, with either therapeutic agent being administered by a regimen calling for two-step administration. The two-step administration regimen may call for sequential administration of the active agents or spaced-apart administration of the separate active agents. The time period between the multiple administration steps may range from, a few minutes to several hours, depending upon the properties of each pharmaceutical agent, such as potency, solubility, bioavailability, plasma half-life and kinetic profile of the pharmaceutical agent. Circadian variation of various physiological parameters may also be evaluated to determine the optimal dose interval.

[0154] Examples of suitable therapeutic agents for co-administration with a composition or a pharmaceutical composition disclosed herein include, but are not limited to, Growth Hormone, Insulin-Like Growth Factor-1, Risperidone, Lumateperone, sodium valproate, lithium, and D-serine.

### EXAMPLES

### Example 1: Identification of SHANK3 Target Sequences in the 3′ UTR

[0155] ASO sequences are designed as 1 nucleotide microwalks of SHANK3 3′ UTR target regions of interest. Matured sequences are generated to optimize therapeutic outcomes utilizing two approaches; employment of advanced algorithms to design mismatches that improve the ASO's neurotoxicity score and systematically introduce mismatches to enhance general tolerability and manufacturability. The resulting ASO sequences correspond to SEQ ID NOs:3-1078, which are provided in Table 1 (Appendix) and in the accompanying sequence listing; and SEQ ID NOs:16254-18750 provided in the accompanying sequence listing. FIG. 1 illustrates a potential mechanism of antisense oligonucleotides by masking binding sites for miRNAs (e.g., a binding site for miR-504) located within the SHANK3 mRNA 3′ UTR and prevent access of these miRNAs to their binding sites, thereby resulting in an increased level of SHANK3 gene expression. For RNA seq analysis of SHANK3 mRNA and miR-504, bulk-RNA-seq raw data was downloaded from the publicly available BrainSpan data repository. Fastq files were quality checked and adapter trimmed using the fastp tool. Then, processed reads were mapped against the T2T genome reference and the lift off gene annotation from Gencode v45. Transcript quantification was performed with Salmon tool using the same lift off gene annotation mentioned before. Transcript quantification was transformed to gene counts using the tximeta R tool. Gene expression analysis was performed in R with edgeR. Samples with <10 million reads were discarded, and data was normalized with the TMM edgeR method. MicroRNA filtered counts from the BrainSpan Small RNA-seq data was obtained from PsychENCODE processed data repository. MicroRNA counts were normalized and expression analysed using edgeR tool in R. FIG. 2 demonstrates the expression of miR-504 (hsa-mir-504-5p) and SHANK3 mRNA expression in human brain samples by RNAseq.

### Example 2: Screening of Peptide-Conjugated Phosphorodiamidate Morpholinos (PPMOs) in a Neuronal Cell Line

[0156] PMO sequences corresponding to (SEQ ID NOs:160, 327, 369, 637, and 687) in Example 1 were conjugated to a cell penetrating peptide (SEQ ID NO: 2) to generate PPMOs and assessed in SH-SY5Y cells for their ability to increase SHANK3 protein expression levels. PPMO were applied to SH-SY5Y neuronal cell line cultures at concentrations of 5 μM and 10 μM and incubated for 5 days. Five days after PPMO treatment, total protein was extracted on ice using RIPA buffer supplemented with 1% protease inhibitor cocktail (Sigma, cat no P8340) and 1×PhosSTOP (Sigma, cat no 4906837001). Protein lysates were cleared by centrifugation, and total protein was quantitated using BCA protein kits (ThermoFisher Scientific, cat no 23225). Expression levels of SHANK3 protein were quantified by Enzyme Linked Immunosorbent Assay (ELISA). Samples were diluted in phosphate buffered saline (PBS), pH 7.4 (1 part lysate+19 parts PBS) and further diluted in 5% RIPA buffer in PBS as necessary, and standard curves were prepared in 5% RIPA buffer in PBS to match. Diluted samples and standards were loaded onto pre-coated human SHANK3 ELISA plates, and the assays were performed as directed by the manufacturer (FineTest, Cat no. EH4462). The absorbances at 450 nm were measured using a VICTOR® Nivo™ multimode plate reader, and quantitative analysis was performed using GraphPad Prism Ver 10.2.3 software. A non-targeting control, predicted not to hybridize to human transcripts, was included as a negative control. Results were first normalized to total protein concentration and then expressed as fold-change relative to untreated cells (UT). FIG. 3 demonstrates the efficacy of PPMOs in inducing SHANK3 protein upregulation. The results showed that the PPMO having an oligonucleotide sequence corresponding to SEQ ID NO:687 significantly upregulates SHANK3 protein up to two fold in SH-SY5Y cells.

### Example 3: Effect of a Selected PPMO on SHANK3 Protein Levels in Human iPSC-Derived Neurons

[0157] A peptide-conjugated PMO (PPMO) having the nucleotide sequence corresponding to SEQ ID NO:160 was selected to test its efficacy in iPSC-derived glutamatergic neurons derived from a healthy control subject (Cell ID: 1332iso). The iPSC-derived glutamatergic neurons were incubated with the PPMO for seven days. At day 7 post-treatment, total protein was extracted, cleared, and quantified as previously described in Example 2. The upregulation level of SHANK3 protein was quantitated using Enzyme Linked Immunosorbent Assay (ELISA). Samples were pre-diluted in phosphate buffered saline (PBS), pH 7.4 (1 part lysate+19 parts PBS) and standard curves were prepared in 5% RIPA buffer in PBS to match. Diluted samples and standards were loaded onto pre-coated human SHANK3 ELISA plates, and the assays were performed as directed by the manufacturer (FineTest, cat no EH4462). The absorbances at 450 nm were measured using a VICTOR® Nivo™ multimode plate reader, and quantitative analysis was performed using GraphPad Prism Ver 10.2.3 software. A non-targeting control, predicted not to hybridize to human transcripts, was included as a negative control. Results were first normalized to total protein concentration and then expressed as fold-change relative to UT. FIG. 4 present the assessment of SHANK3 protein expression at day 7 post PPMO treatment. The results demonstrate 1.3 fold SHANK3 protein upregulation following 10 μM PPMO treatment in iPSC-derived glutamatergic neurons.

[0158] In a subsequent experiment, a PPMO having an oligonucleotide sequence corresponding to SEQ ID NO:1847 disclosed in WO 2023/235915, and having CPP as in examples above (SEQ ID NO:2) was tested in Phelan-McDermid Syndrome (PMS) patient hiPSC-derived glutamatergic neurons. The PPMO was incubated with iPSC-derived glutamatergic neurons in triplicate for 7 days. A non-targeting control, predicted not to hybridize to human transcripts, was included as a negative control. FIG. 5 shows a bar graph representing mean+S.D. of SHANK3 protein normalized to total protein amount loaded relative that of untreated cells. n=1 biological replicate. UT=untreated cells. Graph was generated using GraphPad Prism Ver 10.2.3 software. *p<0.05, **p<0.005, ***p<0.001. One-Way ANOVA. The PPMO was found to increase levels of SHANK3 protein in PMS glutamatergic neurons to a level similar to those found in control neurons.

[0159] SHANK3 has six main isoforms encoded by six different promoters located along the gene. There are five main isoforms well characterized in the brain including a, c, d, e and f (Monteiro et al., 2017). SHANK3 protein isoform ‘a’ is the full length protein of ~185 kDa and contains the six main SHANK3 functional protein domains: (1) SHANK/ProSAP N-terminal (SPN) domain interacts with small GTPases of the Ras superfamily involved in the regulation of synaptic F-actin structure and dynamics and in postsynaptic signal transduction; (2) Ankyrin repeat (ANK) region binds the cytoskeletal protein α-fodrin, an adhesive junction associated protein δ-catenin, and a component of a ubiquitin ligase complex, sharpin; (3) Src homology 3 (SH3) domain directly associates with the Ca2+ channel Ca1.3; (4) PSD-95/DLG/ZO-1 (PDZ) domain is involved in a direct interaction with SAPAP1 or the GluA1 subunit of AMPA receptors; (5) Proline-rich (Pro) region harbors multiple protein interaction sites including those for homer1 and cortactin, relevant for linking of SHANK3 to other PSD scaffolds and the regulation of spinous actin dynamics; (6) Sterile alpha motif (SAM) domain facilitates oligomerization of SHANK3 within the postsynaptic density (PSD) and is required for postsynaptic targeting. SHANK3 isoform ‘c’ contains the last four proteins domains, SH3, PDZ, Pro and SAM domains, and has a mass of ~140 kDa. SHANK3 protein isoform ‘d’ has the last three protein domains (PDZ, Pro and SAM) and a mass ~127 kDa. SHANK3 protein isoform ‘e’ only carries the two last protein domain (Pro and SAM) and has a mass of ~118 kDa. Finally, SAHNK3 protein isoform ‘f’ starts within the Pro domain and includes the SAM domain, making a mass ~88 kDa. The isoforms described above are the main isoform models for a, c, d, e and f, however there are some variants of these ones with and without internal exons (Monteiro et al., supra. The molecular weight (MW) of each isoform can vary due to these isoform variants and post-transcriptional modification.

[0160] Thus, in order to assess the effect of one ASO on expression levels of some separate SHANK3 isoforms, a subsequent experiment, an ASO having the sequence corresponding to SEQ ID NO:1193 disclosed in WO 2023/235915 was tested in commercially available human iPSC-derived glutamatergic neurons (cat no: io1001, bit.bio) to determine the effect of this ASO on various SHANK3 isoforms known to be expressed in glutamatergic neurons. The iPSC-derived glutamatergic neurons were transfected with the ASO at 0.125 μM and 0.25 μM using ViaFect™ Transfection Reagent (cat no: E4981, Promega) and incubated for seven days. At day 7 post-treatment, total protein was extracted, cleared, and quantified. The upregulation level of SHANK3 protein isoforms was assessed using western blot assay. On day 7 post-treatment, protein was extracted on ice using RIPA buffer supplemented with 1% protease inhibitor cocktail (Sigma, cat no P8340) and 1× PhosSTOP (Sigma, cat no 4906837001). Protein lysates were cleared by centrifugation, and total protein was quantitated using BCA protein kits (ThermoFisher Scientific, cat no 23225). Samples were prepared by the addition of 1× Laemmli sample buffer (Bio-Rad, cat no 1610747) and Bond-Breaker™ TCEP (ThermoFisher Scientific, cat no 77720), boiled to denature proteins, then separated on NuPAGE™ 4 to 12% Bis-Tris protein gels (Invitrogen, cat no WG1401BOX). Protein was transferred to 0.2 μm nitrocellulose membranes (Bio-Rad, cat no 162112) by wet transfer overnight at 4° C. The membrane was stained for total protein (Licor, cat no 926-11021) and rabbit monoclonal anti-SHANK3 primary antibody (Cell Signaling Technology, cat no 64555S) followed by anti-rabbit secondary antibody (IRDye® 800CW preabsorbed, Abcam, cat no ab216773). Blots were imaged on an Odyssey Imager, and quantitative analysis was performed using Image Studio Ver 5.5 software. The raw fluorescence signal for each SHANK3 protein isoform was first normalized to the raw fluorescence signal of loading control (total protein). The expression level of the normalized SHANK3 protein isoform was compared to the one of the untreated control, which was set as the baseline value of 1. The expression level of the normalized SHANK3 protein isoforms was compared to those of the untreated control, which were set as the baseline value of 1. FIG. 6 shows the assessment of SHANK3 isoform protein expression at day 7 post ASO treatment determined by western blot assay. The results demonstrate approximately 1.2-1.5 fold upregulation of major SHANK3 isoforms a, c/d. Thus, while levels of each of the major isoforms evaluated were increased, the relative ratio of expression levels between the essential isoforms appears unchanged.

### Example 4: Design for the Maturation of 2′MOE ASO Sequences Targeting the 3′UTR of SHANK3 Transcript

[0161] The 2′-O-methoxyethyl (2′MOE) sequences that target the SHANK3 transcript adjacent to and within the hsa-miR-504 seed sequence (SEQ ID NO: 1079) were further refined by adjusting their length (15-, 16-, 18- and 20-mers) and/or refining their target sequence to reduce GC content and improve neurotoxicity profiles. The resulting ASO sequences correspond to SEQ ID NOs:1080-1093, which are provided in Table 2 and are illustrated in FIG. 7C. FIG. 7 shows the binding sites within the target mRNA region (SEQ ID NO:1079) for ASOs with SEQ ID NOs: 1094 and 1095 (herein) which are originally disclosed in WO 2023/235915 as SEQ ID NO:1193 (“MOE55”) and SEQ ID NO:1847 (“PMO40”), respectively. ASO sequences corresponding to SEQ ID NOs.: 1080-1093, are provided in Table 2 and are illustrated in FIG. 7.

### Example 5: Screening of 2′MOE ASOs Targeting the 3′UTR of the SHANK3 Transcript

[0162] 2′-O-methoxyethyl (2′MOE) ASOs corresponding to SEQ ID NOs: 800, 817, 826,856, 879, 954, 1015, and 1080-1094 were tested to assess their ability to increase SHANK3 protein expression levels. ASOs were transfected at concentrations of 0.5 μM and 1 μM to commercial iPSC-derived Cortical Glutamatergic Neurons (Cat. No. BX-0300-30, BrainXell) using ViaFect Transfection Reagent (Cat no. E4982, Promega). Additionally, a non-targeting control, predicted not to hybridize to human transcripts, was included as a negative control. Seven days after 2′MOE treatment, total protein was extracted, cleared, and quantified as described in Example 2. Expression levels of SHANK3 were assessed following the protocols described in Example 3. FIG. 8 presents the assessment of SHANK3 protein expression in commercial iPSC-derived glutamatergic neurons (Cat. No. BX-0300-30, BrainXells) at day 7 post 2′MOE treatment (n=1 biological replicate; n=3 technical replicates). The results demonstrate that ASOs with SEQ ID NOs: 954, 1092, 1094, 1086, and 1087 increased the expression of SHANK3 protein by >=1.3-fold at 0.5 μM. Additionally, ASOs SEQ ID NOs:: 954, 1091, 1092, 1094, 1087 and 1088 showed a >=1.3-fold SHANK3 protein upregulation at 1 μM treatment in commercial iPSC-derived glutamatergic neurons (Cat. No. BX-0300-30, BrainXells). Furthermore, ASOs with SEQ ID NOs: 1085, 1089, 879, and 1084 showed a slight increased level of SHANK3 protein (>=1.1) at one or both concentrations.

### Example 6: Gymnotic Screening of Selected 2′MOE ASOs on SHANK3 Protein Levels in Human iPSC-Derived Neurons

[0163] Based on the results from Example 5, six ASO sequences (SEQ ID NOs: 1084, 1087, 1091, 1092, 1093, and 1094) were selected fore screening in commercial iPSC-derived glutamatergic neurons (Cat. No. BX-0300-30, BrainXells) via gymnosis. In brief, ASOs with SEQ ID NOs: 1084, 1087, 1091, 1092, 1093, and 1094 were directly incubated with iPSC-derived glutamatergic neurons at concentrations of 7.5 μM, 15 μM, and 30 μM. At 14-day post treatment, total protein was harvested as described in Example 2 and SHANK3 protein expression levels were determined as described in Example 3. FIG. 9 illustrates the effect of the selected 2′MOEs on SHANK3 protein levels in human iPSC-derived neurons (n=1 biological replicate; n=3 technical replicates). In some test cases (SEQ ID NOs: 1091, 1084, 1094, and 1087) 2′MOE treatment demonstrated a >=1.3 fold SHANK3 protein upregulation at 7.5 μM treatment in commercial iPSC-derived glutamatergic neurons (Cat. No. BX-0300-30, BrainXells). In some other cases (SEQ ID NOs: 1084, 1094, and 1087) 2′MOE treatment demonstrated a >=1.3 fold SHANK3 protein upregulation at 15 μM treatment in commercial iPSC-derived glutamatergic neurons (Cat. No. BX-0300-30, BrainXells). In some other cases (SEQ ID NOs: 1091, 1092, and 1094) 2′MOE treatment demonstrated a >=1.3 fold SHANK3 protein upregulation at 30 μM treatment in commercial iPSC-derived glutamatergic neurons (Cat. No. BX-0300-30, BrainXells). ASOs with SEQ ID NOs: 1091, 1092, 1084, 1094, and 1087 showed a slightly increased level of SHANK3 protein (>=1.1) at one or both concentrations. The differences in protein upregulation fold change between FIG. 8 and FIG. 9 may be attributed to the transfection efficiency of each ASO, whether delivered with the transfection reagent or via gymnosis.

### Example 7: Chemical Modification of Selected MOEs to Optimize ASOs for Increased SHANK3 Protein Expression

[0164] Locked nucleic acids (LNAs) were incorporated into the selected 2′MOE ASO sequences (SEQ ID NOs: 1084, 1087, 1091, 1092, 1093, and 1094) from Example 6 in order to increase their potency and specificity. Each ASO sequence (SEQ ID NOs: 1096-1103, 1107, 1111, 1112, 1119, 1120, 1125, and 1132) was designed with the addition of two or three LNAs. In these cases, LNAs were either distributed to divide the ASO into equal parts, or placed in specific nucleotides that have mismatches to potential off-target sequences, reducing the likelihood of the ASO to hybridize in a stable manner to off-target mRNA sequences. Additionally, one or two nucleotides within the parental ASO sequences (SEQ ID NOs: 1084, 1087, 1091, 1092, 1093, and 1094) were replaced by abasic spacers. To account for the loss of binding strength when using abasic spacers, ASO sequences including abasic spacers (SEQ ID NOs: 1104-1106, 1108-1110, 1113-1118, 1121-1124, 1126-1131 and 1133) comprise one or two LNAs on the nucleotides flanking an abasic spacer. Abasic spacers were included to reduce the GC content of the parental ASO sequences (SEQ ID NOs: 1084, 1087, 1091, 1092, 1093, and 1094) to improve their tolerability and manufacturing. All ASO sequences designed with LNAs and LNAs with abasic spacers are listed in Table 3, in which LNA modified nucleotides are denoted by a “*” and abasic spacers with an “S”.

### Example 8: Effect of Selected Derivatized MOEs on SHANK3 Protein Levels in Human iPSC-Derived Neurons

[0165] LNA modified 2′MOE ASOs (SEQ ID NOs:1096-1133) were screened in commercial iPSC-derived glutamatergic neurons (Cat. No. BX-0300-30, BrainXells) via gymnosis. ASOs were directly added to the media of seeded cells at three doses: 7.5 μM, 15 μM and 30 μM. Total protein was harvested at day 14 post-treatment as described in Example 2 and SHANK3 protein upregulation was determined as stated in Example 3. FIG. 10 illustrates the effect of LNA modified ASO sequences on SHANK3 protein levels in commercial iPSC-derived glutamatergic neurons (Cat. No. BX-0300-30, BrainXells) transfected via gymnosis (n=1 biological replicate; n=3 technical replicates). The bar plots represent the mean±SD of SHANK3 protein normalized to the total protein loaded, relative to the normalized SHANK3 protein of untreated cells. White bar plots correspond to untreated cell controls (UT) and non-targeting control (NTC); light gray, dark gray, and black bars represent cells treated with ASO at 7.5 μM, 15 μM and 30 μM, respectively. FIG. 10A shows the screening of derivates from three parental 18-mer ASO sequences (SEQ ID NOs: 1091, 1093, and 1092). In some cases, ASO sequences achieved >=1.3 fold at 7.5 μM (SEQ ID NOs: 1115, 1119, and 1122). In some other cases, ASO sequences achieved >=1.3 fold at 15 μM (SEQ ID NOs: 1127 and 1128). In some other cases, ASO sequences achieved >=1.3 fold at 30 μM (SEQ ID NO: 1121). In some other cases, ASO sequences with SEQ ID NOs: 1114, 1119, 1120, 1121, 1122, 1123, 1125, and 1127 presented a slight increase of SHANK3 protein of >=1.1-fold change. FIG. 10B shows the screening of derivates from three parental ASO sequences of diverse lengths 15-mer (SEQ ID NO:1084), 17-mer (SEQ ID NO:1094) and 20-mer (SEQ ID NO:1087). In some cases, ASO sequences achieved >=1.3 fold at 7.5 μM (SEQ ID NOs:1096, 1103, 1109, and 1111-1113). In some other cases, ASO sequences achieved 1.3 fold at 15 μM (SEQ ID NO.: 1096, 1103, 1109-1111 and 1104-1106). In some other cases, ASO sequences achieved >=1.3 fold at 30 μM (SEQ ID NOs: 1096, 1103, 1109-1111, and 1113). In some other cases, ASO sequences with SEQ ID NO: 1097, 1100, 1102, and 1107 presented a slight increase of SHANK3 protein of >=1.1-fold change.

### Example 9: Effect of Selected MOEs on SHANK3 Protein Levels in Human iPSC-Derived Neurons from Phelan-McDermid Syndrome Patients

[0166] 2′MOE ASOs having the nucleotide sequence corresponding to SEQ ID NOs: 1094, 1087, 1091, 1093 and 1092 were screened to test their efficacy in increasing SHANK3 protein in iPSC-derived glutamatergic neurons derived from a Phelan-McDermid Syndrome patient (PMS patient #1) via gymnotic uptake. ASOs were directly added to the media of cultured cells at four concentrations: 7.5 μM, 15 μM, 30 μM and 45 μM. Total protein was harvested at day 14 post-treatment as described in Example 2 and SHANK3 protein upregulation was determined as stated in Example 3. FIG. 11A illustrates the effect of tested ASOs on SHANK3 protein levels in iPSC-derived glutamatergic neurons derived from a Phelan-McDermid Syndrome patient transfected via gymnosis nN=1 biological replicate; n=3 technical replicates). In some cases, ASO treatment (SEQ ID NOs: 1094, 1087 and 1092) significantly increased >=1.5-fold SHANK3 protein at an ASO concentration of 7.5 μM. In some cases, ASO treatment (SEQ ID NOs: 1094, 1087, 1091 and 1092) significantly increased >=1.5-fold SHANK3 protein at an ASO concentration of 15 μM. In some cases, ASO treatment (SEQ ID NOs: 1094, 1087, 1091, 1093 and 1092) significantly increased >=1.5-fold SHANK3 protein at an ASO concentration of 30 μM. In some cases, ASO treatment (SEQ ID NOs: 1094, 1087 and 1092) significantly increased >=1.5-fold SHANK3 protein at an ASO concentration of 45 μM. In some cases, ASO treatment (SEQ ID NOs: 1094, 1087, 1091, 1093 and 1092) increased >=1.3-fold SHANK3 protein at three or all ASO concentrations tested. In some cases, ASO treatment (SEQ ID NOs: 1094, 1087, 1091, 1093 and 1092) increased >=1.1-fold SHANK3 protein at all ASO concentrations tested.

[0167] A subsequent experiment was conducted with LNA-modified and fully 2′MOE parental ASOs having nucleotide sequences corresponding to SEQ ID NOs:1122, 1093, 1126, 1128, and 1092. These ASOs were tested for their efficacy in iPSC-derived glutamatergic neurons from a Phelan-McDermid Syndrome patient (PMS patient #1) via gymnotic uptake. ASOs were incubated directly with cells at three concentrations: 7.5 μM, 15 μM and 30 μM. Parental ASO sequences with SEQ ID NOs: 1092 and 1093 were applied only at 30 μM. Total protein was harvested at day 14 post-treatment as described in Example 2, and SHANK3 protein upregulation was assessed as outlined in Example 3. FIG. 11B illustrates the effect of tested ASOs on SHANK3 protein levels in iPSC-derived glutamatergic neurons derived from a Phelan-McDermid Syndrome patient transfected via gymnosis (n=1 biological replicate; n=3 technical replicates). In all cases and concentrations tested, ASO sequences (SEQ ID NOs: 1122, 1093, 1126, 1128, and 1092) achieved >=1.5-fold change of SHANK3 protein upregulation over untreated cells. Significance of the fold change was calculated with a one-way ANOVA test where (*) denotes a p. adj <0.05, (**) a p. adj <0.01, (***) a p. adj <0.005 and (****) a p. adj <0.001.

### Example 10: Effect of Selected MOEs on SHANK3 Protein Levels in Human iPSC-Derived Neurons from Phelan-McDermid Syndrome Patients

[0168] Spontaneous calcium oscillations have been shown to be impaired in PMS patient-derived neurons compared to unaffected control neurons (Darville, et al. 2016). To investigated whether PMS patient iPSC-derived neurons in this study show similar impairments in neuronal function, calcium oscillation activity was assessed in two independent PMS patient lines (PMS patient #1 and #2) compared to two non-PMS (non-SHANK3-deficient) control lines. In brief, intracellular calcium was measured with Fluo-4 Direct™ (cat no. F10471, ThermoFisher) following manufacture's protocol, and plates were incubated at 37° C. for 60 min. Plates were read on CLARIOstar (software version 5.70 R3) with fluorescence mode at 494/516 nm (ex/em) for 1 minute at 0.1 sec intervals. Raw data was pre-processed in R program adapted from Per Uhlen, 2004 for Spectral Analysis of Calcium Oscillations, in which a trend correction and catering of the signal is performed followed by normalizing the data to frequency to obtain the power spectral density, referred as signal intensity. Signal intensities lower than the mean signal intensity from blanks (wells without cells) were filter out. Remaining data was used to calculate the median signal intensity for each sample and condition. FIG. 12A illustrates the signal intensity baseline of the calcium oscillations in two PMS patient and two non-PMS control iPSC-derived glutamatergic neurons (commercial BrainXells and donor iPSC). The bar plots are divided in two sets, one for each PMS cell line, as PMS patient #1 together with its non-PMS controls was seeded at 25,000-30,000 cells per well, while the set of PMS patient #2 at 10,000 cells per well. Both PMS patient lines show a decreased signal intensity compared to both SHANK3-non-deficient lines. To test whether increased SHANK3 protein following ASO treatment resulted in increased neuronal activity in Phelan-McDermid patient iPSC-derived glutamatergic neurons (PMS patient #1), calcium oscillations were assessed 21 days post gymnotic ASO treatment. In brief, iPSC-derived neurons were single-dose treated with 2′MOEs corresponding to SEQ ID NOs: 1094, 1091, 1092, 1087, and 1093 at 15 μM and 30 μM and assessed 21 days post-treatment (FIG. 12B). Additionally, a double-dose treatment with SEQ ID NOs:1094, 1091, 1092, 1087 and 1093 was performed for the 15 μM, 7 days after the first treatment (FIG. 12C). At day 21 post-treatment, intracellular calcium was measured and analysed as described above. Untreated ASO wells were incubated for 60 minutes with BAPTA-AM, as a negative control, at 20 μM (Cat no. B1205, Invitrogen); or positive control Ionomycin at 1 μM (Cat no. 124222, Invitrogen) prior to plate reading (FIG. 12C). FIG. 12B illustrates the change in the signal intensity of the calcium oscillations as a response to the single-dose gymnotic ASO treatment at 15 μM and 30 μM, day-21 post treatment. All ASO treatments with SEQ ID NO: 1094, 1091, 1092, 1087 and 1093 increased (>=1.1-fold change) calcium oscillations signal intensity compared to PMS untreated cells. FIG. 12C illustrates the change in the signal intensity of the calcium oscillations as a response to the double-dose gymnotic ASO treatment at 15 μM on day-21 post treatment. ASO treatment with SEQ ID NO: 1094, 1091 and 1092 increased (>=1.1-fold change) the signal intensity of calcium oscillations compared to PMS untreated cells.

### Example 11: Identification of SHANK3 Target Sequences

[0169] Identification of annotated and expressed transcripts that could generate the canonical transcript of the SHANK3 gene was performed by the sequence alignment of all SHANK3 protein-coding and NMD transcripts described in Gencode v38. An ASO sequence “micro-walk” of 18mers and 25-mers in 1 bp increments was performed over the sequences of intron 7, 17, and 21 of the ENST00000262795.6 pre-mRNA transcript and designed to target the intronic splice enhancer motif to mediate exclusion of the retained intron or part thereof and generate productive SHANK3 mRNA transcript. The resulting ASO sequences correspond to SEQ ID NOs:4584-11700 provided in the accompanying sequence listing (incorporated by reference herein).

[0170] It will be appreciated by persons skilled in the art that numerous variations and/or modifications may be made to the invention as shown in the specific examples without departing from the spirit or scope of the invention as broadly described. The present examples are, therefore, to be considered in all respects as illustrative and not restrictive.

[0171] This application claims priority from: Australian Provisional Application No. 2023903841 filed on 29 Nov. 2023; Australian Provisional Application No. 2023903842 filed on 29 Nov. 2023; Australian Provisional Application No. 2023903916 filed on 4 Dec. 2023; Australian Provisional Application No. 2023903924 filed on 5 Dec. 2023; Australian Provisional Application No. 2023903927 filed on 6 Jun. 2024; Australian Provisional Application No. 2024901708 filed on 6 Jun. 2024, Australian Provisional Application No. 2024902223 filed on 17 Jul. 2024; and Australian Provisional Application No. 2024903714 filed on 13 Nov. 2024, the entire contents of each of which are hereby incorporated by reference in their entirety.

[0172] All publications cited herein are hereby incorporated by reference in their entirety. Where reference is made to a URL or other such identifier or address, it is understood that such identifiers can change and particular information on the internet can come and go, but equivalent information can be found by searching the internet. Reference thereto evidences the availability and public dissemination of such information.

[0173] Any discussion of documents, acts, materials, devices, articles or the like that have been included in the present specification is solely for the purpose of providing a context for the present invention. It is not to be taken as an admission that any or all of these matters form part of the prior art base or were common general knowledge in the field relevant to the present invention as it existed before the priority date of each claim of this application.

### REFERENCES

[0174] Alia et al., (2019), Frontiers in Neuroscience, 13:684.
[0175] Boyé et al., (2022), Nature Communications, 13:1169.doi.org/10.1038/s41467-022-28785-9.
[0176] Darville et al., (2016), eBioMedicine, 9:293-305.
[0177] Dugal-Tessier et al., (2021), J Clin Med., 10(4):838.
[0178] Fitzgerald et al., (2020), Stem Cells, 38(11):1375-1386.
[0179] Kim et al., (2014), Frontiers in Neuroscience, 8:109.
[0180] Monteiro et al. (2017), Nature Rev Neurosci, 18(3):147-157.
[0181] Prakash et al., (2019), Nucleic Acids Research, 47(12):6029-6044.
[0182] Rak et al., (2016), J Gene Med, 18(11-12):331-342.

APPENDIX
Sequences and SEQ ID NOS

SEQ ID NO: 1
SHANK3 mRNA Canonical Transcript 3′ UTR Sequence (from SHANK3-
201 ENST00000262795.7)
CGCCCCACCCCCACTCCCGCCCCGGCCGTGCCCTGCCGGCAGGGCCCCCCACCCCCACCC
CGGGCCGCGGGCTCGGCCTGCCCCTTACGACGGCGCCCGGGCCAGGAATGTTGCATGAAT
CGTCCTGTTTGCTGTTGCTCGGAGACTCGCCCTGTACATTGCTTAGTGCCCTCACCGGCC
GCCCAGCCCACCCAGCGCACAGTCAGGAAGGGCGTGGACCAGGGAGGCTGGGGGGGGAGG
TGCCGGGGGTGGGGTGCCCTAGCGTGACCACCTCCTTCGCAGCTCCTGGTGGCCATTCTC
CCAGAGGGGGAACCTAGTCCAGCATGCGAGGTCAGGACCCGCCTTGGTGACTCGGGGGGA
GGGGGGAGACATTGGGATTCTCGATGGGGGCCAAGGAGCCCCCCTGTTTTGCATATTTTA
ATCCACTCTATATTTGGAACGAGAAAAGGAACAAATATCTCTGTCCGTAATAGTTTCCTC
TCCCCTCCCTTCTACTTCCACTGGTCCCACTGCAGCTGCCCAGTCTTCCATCTCCGGCCC
CTCACTGCCACTGCCACCCCACAACGGGGCAGGGGACGCTCCAGCTGGTCTGGGGTTGGC
CAGGGCCCTAGTGGCCCGCCCTGGGGCCCCAGCTCGGCCCCTCGCCTCGCTGAGCTCTAG
TGTGCCCCACCGACCCTTCAGGTGCTGCTCGTGGTGGGAGGGGCGGCAGGCCGCGGGTCC
TGCTGTGCACCCGCGGGACCAGCCGGCCTGGGAGACCATCGGCCGGGGGGGATGAGGGCA
GGGCCCTGCCGCTCCACCGCAGCCATCTTCCTCACAGGGTCTCTCCCCAAGGAGGGGGCT
AGCTTGGTCCCCATGCTCTTGGGCAACTACAGCAGAGAAGCCTCCCTGCCTTGGACCCCA
AAGTCTCCTGTCCTGCCCTTTATGTGTGTGGGTGAAACTGGGTGCGTCTGAGCACGTGGG
AGCCGTGTGTGTGCCTGATTACTGAGTGGCCACCAGGGGCCGCTCTGGACTAGCGCGGGG
CCGTGGAGGCGTGCACCGTGTGCATGCGTGGGGTGTACCTGTGAGAGCACCCTGTCTCCT
CTTCCAAAGAAAGTCAGAGGCCATCCTGCACCCTGGGTCCAGCTGTTTGCCCAGCCTGTC
CTTCCAGAGCCTCACCCAGCCTGAGCGGGGTTCCCTGGTGAATCCCTGCTGCTTGGGGAG
GCCCCAAGGGCCCCTTGGAGGCAGCGCCCCCACCTTGGGCTTCTGAGGGCATCATAGGGG
GACCCCTAGAGTCAGTTCACCACAGGCCCTGGGGAGAGTCAAAGACCCCCGAGGGTGCCC
AGCCCCCCACACTGTGACTCCTCACACTCAGCGATGACCTGTGGGGTGGGGGGCCCTGGG
ACGTTTTTAAACCTAGGGTTTGGAGTCTGGACTAAGCTCCATCCACGTCACTCACAAGTT
TCTGTTTATATTTCTAGCTTTTTTTAATAAAATAAAAAAAAAAAGAAAACAGAAGTTTTC
ACAACCCAGGGGCCTGGCACGCCGGTCTGTGCCTGCCCGCCCCGCCCTGGCCCACCGGCC
CCACTCCCTGGGCACAGAGTCACACCCACTCATCCTTCCGCCAACAGTCCAGGTCACACA
GCAGCAGTCACTGTAACAGACTGCCACATACACACTCGGTCTCACACTCACCTGTGGGTT
TTGGTTCCGTTCAATTTGGGTTTTTAACTTTACAGGGTCAGTTCCGCTTCACCTCCTTTT
GTATGGAGTTCCATCCGGGGGGTTTCACCCCCTGCTCCAGTCCTGAGGCCTCCTGACCCT
GACGTTGTGATACGCCCCACAGAGATCTATGTTTCTTATATTATTATTATTGATAATAAT
TATTATAATATTATTATGTAATAAATTTATAAGAAATGAA
SEQ ID NO: 2
CPP Amino Acid Sequence (Artificial/Synthetic)
RRSRTARAGRPGRNSSRPSAPR
SEQ ID NO: 1079
target region within the 3′UTR of SHANK3
TTTTGGTTCCGTTCAATTTGGGTTTTTAACTTTACAGGGTCAGTTCCGCTTCACCTCCTTTT
GTATGGAGTTCCAT

TABLE 1
Exemplary ASO or AR Sequences Targeting
SHANK3 mRNA 3′ UTR

| SEQ | | | |
|---|---|---|---|
| ID | | | ASO |
| NO | Sequence | Name | type |
| 3 | GTAAAGTTAAAAACCCAAATTGAAC | SHANK3 H22A(+1689+1713) | 25 mer |
| 4 | TTAAAGTTAAAAACCCAAATTGAAC | SHANK3 H22A(+1689+1713) 1mm_1 | 25 mer |
| 5 | GTAAAGTTAAAAATCCAAATTGAAC | SHANK3 H22A(+1689+1713) 1mm_14 | 25 mer |
| 6 | GTAAAGTTAAAAACTCAAATTGAAC | SHANK3 H22A(+1689+1713) 1mm_15 | 25 mer |
| 7 | GTAAAGTTAAAAACCTAAATTGAAC | SHANK3 H22A(+1689+1713) 1mm_16 | 25 mer |
| 8 | GTAAAGTTAAAAACCCAAATTTAAC | SHANK3 H22A(+1689+1713) 1mm_22 | 25 mer |
| 9 | GTAAAGTTAAAAACCCAAATTGAAT | SHANK3 H22A(+1689+1713) 1mm_25 | 25 mer |
| 10 | GTAAATTTAAAAACCCAAATTGAAC | SHANK3 H22A(+1689+1713) 1mm_6 | 25 mer |
| 11 | ATAAAATTAAAAACCCAAATTGAAC | SHANK3 H22A(+1689+1713) 2mm_1_6 | 25 mer |
| 12 | GTAAAGTTAAAAACCCAAATTAAAC | SHANK3 H22A(+1689+1713) mm1 | 25 mer |
| 13 | GTAAAATTAAAAACCCAAATTAAAC | SHANK3 H22A(+1689+1713) mm2 | 25 mer |
| 14 | TGTAAAGTTAAAAATCCAAATTGAA | SHANK3 H22A(+1690+1714) 1mm_15 | 25 mer |
| 15 | TGTAAAGTTAAAAACTCAAATTGAA | SHANK3 H22A(+1690+1714) 1mm_16 | 25 mer |
| 16 | TGTAAAGTTAAAAACCTAAATTGAA | SHANK3 H22A(+1690+1714) 1mm_17 | 25 mer |
| 17 | TTTAAAGTTAAAAACCCAAATTGAA | SHANK3 H22A(+1690+1714) 1mm_2 | 25 mer |
| 18 | TGTAAAGTTAAAAACCCAAATTTAA | SHANK3 H22A(+1690+1714) 1mm_23 | 25 mer |
| 19 | TGTAAATTTAAAAACCCAAATTGAA | SHANK3 H22A(+1690+1714) 1mm_7 | 25 mer |
| 20 | TGTAAAGTTAAAAACCCAAATTAAA | SHANK3 H22A(+1690+1714) mm1 | 25 mer |
| 21 | TGTAAAATTAAAAACCCAAATTAAA | SHANK3 H22A(+1690+1714) mm2 | 25 mer |
| 22 | CTGTAAAGTTAAAAACCCAAATTGA | SHANK3 H22A(+1691+1715) | 25 mer |
| 23 | TTGTAAAGTTAAAAACCCAAATTGA | SHANK3 H22A(+1691+1715) 1mm_1 | 25 mer |
| 24 | CTGTAAAGTTAAAAATCCAAATTGA | SHANK3 H22A(+1691+1715) 1mm_16 | 25 mer |
| 25 | CTGTAAAGTTAAAAACTCAAATTGA | SHANK3 H22A(+1691+1715) 1mm_17 | 25 mer |
| 26 | CTGTAAAGTTAAAAACCTAAATTGA | SHANK3 H22A(+1691+1715) 1mm_18 | 25 mer |
| 27 | CTGTAAAGTTAAAAACCCAAATTTA | SHANK3 H22A(+1691+1715) 1mm_24 | 25 mer |
| 28 | CTTTAAAGTTAAAAACCCAAATTGA | SHANK3 H22A(+1691+1715) 1mm_3 | 25 mer |
| 29 | CTGTAAATTTAAAAACCCAAATTGA | SHANK3 H22A(+1691+1715) 1mm_8 | 25 mer |
| 30 | CTGTAAAGTTAAAAACCCAAATTAA | SHANK3 H22A(+1691+1715) mm1 | 25 mer |
| 31 | CTGTAAAATTAAAAACCCAAATTAA | SHANK3 H22A(+1691+1715) mm2 | 25 mer |
| 32 | TCTGTAAAGTTAAAAACCCAAATTG | SHANK3 H22A(+1692+1716) 1mm_1 | 25 mer |
| 33 | CCTGTAAAGTTAAAAATCCAAATTG | SHANK3 H22A(+1692+1716) 1mm_17 | 25 mer |
| 34 | CCTGTAAAGTTAAAAACTCAAATTG | SHANK3 H22A(+1692+1716) 1mm_18 | 25 mer |
| 35 | CCTGTAAAGTTAAAAACCTAAATTG | SHANK3 H22A(+1692+1716) 1mm_19 | 25 mer |
| 36 | CTTGTAAAGTTAAAAACCCAAATTG | SHANK3 H22A(+1692+1716) 1mm_2 | 25 mer |
| 37 | CCTTTAAAGTTAAAAACCCAAATTG | SHANK3 H22A(+1692+1716) 1mm_4 | 25 mer |
| 38 | CCTGTAAATTTAAAAACCCAAATTG | SHANK3 H22A(+1692+1716) 1mm_9 | 25 mer |
| 39 | CCTGTAAAGTTAAAAACCCAAATTA | SHANK3 H22A(+1692+1716) mm1 | 25 mer |
| 40 | CCTGTAAAATTAAAAACCCAAATTA | SHANK3 H22A(+1692+1716) mm2 | 25 mer |
| 41 | TCCTGTAAAGTTAAAAACCCAAATT | SHANK3 H22A(+1693+1717) 1mm_1 | 25 mer |
| 42 | CCCTGTAAATTTAAAAACCCAAATT | SHANK3 H22A(+1693+1717) 1mm_10 | 25 mer |
| 43 | CCCTGTAAAGTTAAAAATCCAAATT | SHANK3 H22A(+1693+1717) 1mm_18 | 25 mer |
| 44 | CCCTGTAAAGTTAAAAACTCAAATT | SHANK3 H22A(+1693+1717) 1mm_19 | 25 mer |
| 45 | CTCTGTAAAGTTAAAAACCCAAATT | SHANK3 H22A(+1693+1717) 1mm_2 | 25 mer |
| 46 | CCCTGTAAAGTTAAAAACCTAAATT | SHANK3 H22A(+1693+1717) 1mm_20 | 25 mer |
| 47 | CCTTGTAAAGTTAAAAACCCAAATT | SHANK3 H22A(+1693+1717) 1mm_3 | 25 mer |
| 48 | CCCTTTAAAGTTAAAAACCCAAATT | SHANK3 H22A(+1693+1717) 1mm_5 | 25 mer |
| 49 | CCCTGTAAAATTAAAAACCCAAATT | SHANK3 H22A(+1693+1717) mm1 | 25 mer |
| 50 | CCCTATAAAATTAAAAACCCAAATT | SHANK3 H22A(+1693+1717) mm2 | 25 mer |
| 51 | ACCCTGTAAAGTTAAAAACCCAAAT | SHANK3 H22A(+1694+1718) | 25 mer |
| 52 | ACCCTGTAAATTTAAAAACCCAAAT | SHANK3 H22A(+1694+1718) 1mm_11 | 25 mer |
| 53 | ACCCTGTAAAGTTAAAAATCCAAAT | SHANK3 H22A(+1694+1718) 1mm_19 | 25 mer |
| 54 | ATCCTGTAAAGTTAAAAACCCAAAT | SHANK3 H22A(+1694+1718) 1mm_2 | 25 mer |
| 55 | ACCCTGTAAAGTTAAAAACTCAAAT | SHANK3 H22A(+1694+1718) 1mm_20 | 25 mer |
| 56 | ACCCTGTAAAGTTAAAAACCTAAAT | SHANK3 H22A(+1694+1718) 1mm_21 | 25 mer |
| 57 | ACTCTGTAAAGTTAAAAACCCAAAT | SHANK3 H22A(+1694+1718) 1mm_3 | 25 mer |
| 58 | ACCTTGTAAAGTTAAAAACCCAAAT | SHANK3 H22A(+1694+1718) 1mm_4 | 25 mer |
| 59 | ACCCTTTAAAGTTAAAAACCCAAAT | SHANK3 H22A(+1694+1718) 1mm_6 | 25 mer |
| 60 | ACCCTGTAAAATTAAAAACCCAAAT | SHANK3 H22A(+1694+1718) mm1 | 25 mer |
| 61 | ACCCTATAAAATTAAAAACCCAAAT | SHANK3 H22A(+1694+1718) mm2 | 25 mer |
| 62 | GACCCTGTAAAGTTAAAAACCCAAA | SHANK3 H22A(+1695+1719) | 25 mer |
| 63 | TACCCTGTAAAGTTAAAAACCCAAA | SHANK3 H22A(+1695+1719) 1mm_1 | 25 mer |
| 64 | GACCCTGTAAATTTAAAAACCCAAA | SHANK3 H22A(+1695+1719) 1mm_12 | 25 mer |
| 65 | GACCCTGTAAAGTTAAAAATCCAAA | SHANK3 H22A(+1695+1719) 1mm_20 | 25 mer |
| 66 | GACCCTGTAAAGTTAAAAACTCAAA | SHANK3 H22A(+1695+1719) 1mm_21 | 25 mer |
| 67 | GACCCTGTAAAGTTAAAAACCTAAA | SHANK3 H22A(+1695+1719) 1mm_22 | 25 mer |
| 68 | GATCCTGTAAAGTTAAAAACCCAAA | SHANK3 H22A(+1695+1719) 1mm_3 | 25 mer |
| 69 | GACTCTGTAAAGTTAAAAACCCAAA | SHANK3 H22A(+1695+1719) 1mm_4 | 25 mer |
| 70 | GACCTTGTAAAGTTAAAAACCCAAA | SHANK3 H22A(+1695+1719) 1mm_5 | 25 mer |
| 71 | GACCCTTTAAAGTTAAAAACCCAAA | SHANK3 H22A(+1695+1719) 1mm_7 | 25 mer |
| 72 | GACCCTGTAAAATTAAAAACCCAAA | SHANK3 H22A(+1695+1719) mm1 | 25 mer |
| 73 | GACCCTATAAAATTAAAAACCCAAA | SHANK3 H22A(+1695+1719) mm2 | 25 mer |
| 74 | TGACCCTGTAAATTTAAAAACCCAA | SHANK3 H22A(+1696+1720) 1mm_13 | 25 mer |
| 75 | TTACCCTGTAAAGTTAAAAACCCAA | SHANK3 H22A(+1696+1720) 1mm_2 | 25 mer |
| 76 | TGACCCTGTAAAGTTAAAAATCCAA | SHANK3 H22A(+1696+1720) 1mm_21 | 25 mer |
| 77 | TGACCCTGTAAAGTTAAAAACTCAA | SHANK3 H22A(+1696+1720) 1mm_22 | 25 mer |
| 78 | TGACCCTGTAAAGTTAAAAACCTAA | SHANK3 H22A(+1696+1720) 1mm_23 | 25 mer |
| 79 | TGATCCTGTAAAGTTAAAAACCCAA | SHANK3 H22A(+1696+1720) 1mm_4 | 25 mer |
| 80 | TGACTCTGTAAAGTTAAAAACCCAA | SHANK3 H22A(+1696+1720) 1mm_5 | 25 mer |
| 81 | TGACCTTGTAAAGTTAAAAACCCAA | SHANK3 H22A(+1696+1720) 1mm_6 | 25 mer |
| 82 | TGACCCTTTAAAGTTAAAAACCCAA | SHANK3 H22A(+1696+1720) 1mm_8 | 25 mer |
| 83 | TAACCCTGTAAAATTAAAAACCCAA | SHANK3 H22A(+1696+1720) 2mm_2_13 | 25 mer |
| 84 | TGACCCTGTAAAATTAAAAACCCAA | SHANK3 H22A(+1696+1720) mm1 | 25 mer |
| 85 | TGACCCTATAAAATTAAAAACCCAA | SHANK3 H22A(+1696+1720) mm2 | 25 mer |
| 86 | CTGACCCTGTAAAGTTAAAAACCCA | SHANK3 H22A(+1697+1721) | 25 mer |
| 87 | TTGACCCTGTAAAGTTAAAAACCCA | SHANK3 H22A(+1697+1721) 1mm_1 | 25 mer |
| 88 | CTGACCCTGTAAATTTAAAAACCCA | SHANK3 H22A(+1697+1721) 1mm_14 | 25 mer |
| 89 | CTGACCCTGTAAAGTTAAAAATCCA | SHANK3 H22A(+1697+1721) 1mm_22 | 25 mer |
| 90 | CTGACCCTGTAAAGTTAAAAACTCA | SHANK3 H22A(+1697+1721) 1mm_23 | 25 mer |
| 91 | CTGACCCTGTAAAGTTAAAAACCTA | SHANK3 H22A(+1697+1721) 1mm_24 | 25 mer |
| 92 | CTTACCCTGTAAAGTTAAAAACCCA | SHANK3 H22A(+1697+1721) 1mm_3 | 25 mer |
| 93 | CTGATCCTGTAAAGTTAAAAACCCA | SHANK3 H22A(+1697+1721) 1mm_5 | 25 mer |
| 94 | CTGACTCTGTAAAGTTAAAAACCCA | SHANK3 H22A(+1697+1721) 1mm_6 | 25 mer |
| 95 | CTGACCTTGTAAAGTTAAAAACCCA | SHANK3 H22A(+1697+1721) 1mm_7 | 25 mer |
| 96 | CTGACCCTTTAAAGTTAAAAACCCA | SHANK3 H22A(+1697+1721) 1mm_9 | 25 mer |
| 97 | CTAACCCTGTAAAATTAAAAACCCA | SHANK3 H22A(+1697+1721) 2mm_3_14 | 25 mer |
| 98 | CTGACCCTGTAAAATTAAAAACCCA | SHANK3 H22A(+1697+1721) mm1 | 25 mer |
| 99 | CTGACCCTATAAAATTAAAAACCCA | SHANK3 H22A(+1697+1721) mm2 | 25 mer |
| 100 | ACTGACCCTGTAAAGTTAAAAACCC | SHANK3 H22A(+1698+1722) | 25 mer |
| 101 | ACTGACCCTTTAAAGTTAAAAACCC | SHANK3 H22A(+1698+1722) 1mm_10 | 25 mer |
| 102 | ACTGACCCTGTAAATTTAAAAACCC | SHANK3 H22A(+1698+1722) 1mm_15 | 25 mer |
| 103 | ATTGACCCTGTAAAGTTAAAAACCC | SHANK3 H22A(+1698+1722) 1mm_2 | 25 mer |
| 104 | ACTGACCCTGTAAAGTTAAAAATCC | SHANK3 H22A(+1698+1722) 1mm_23 | 25 mer |
| 105 | ACTGACCCTGTAAAGTTAAAAACTC | SHANK3 H22A(+1698+1722) 1mm_24 | 25 mer |
| 106 | ACTGACCCTGTAAAGTTAAAAACCT | SHANK3 H22A(+1698+1722) 1mm_25 | 25 mer |
| 107 | ACTTACCCTGTAAAGTTAAAAACCC | SHANK3 H22A(+1698+1722) 1mm_4 | 25 mer |
| 108 | ACTGATCCTGTAAAGTTAAAAACCC | SHANK3 H22A(+1698+1722) 1mm_6 | 25 mer |
| 109 | ACTGACTCTGTAAAGTTAAAAACCC | SHANK3 H22A(+1698+1722) 1mm_7 | 25 mer |
| 110 | ACTGACCTTGTAAAGTTAAAAACCC | SHANK3 H22A(+1698+1722) 1mm_8 | 25 mer |
| 111 | ACTAACCCTGTAAAATTAAAAACCC | SHANK3 H22A(+1698+1722) 2mm_4_15 | 25 mer |
| 112 | ACTGACCCTGTAAAATTAAAAACCC | SHANK3 H22A(+1698+1722) mm1 | 25 mer |
| 113 | ACTGACCCTATAAAATTAAAAACCC | SHANK3 H22A(+1698+1722) mm2 | 25 mer |
| 114 | AACTGACCCTTTAAAGTTAAAAACC | SHANK3 H22A(+1699+1723) 1mm_11 | 25 mer |
| 115 | AACTGACCCTGTAAATTTAAAAACC | SHANK3 H22A(+1699+1723) 1mm_16 | 25 mer |
| 116 | AACTGACCCTGTAAAGTTAAAAATC | SHANK3 H22A(+1699+1723) 1mm_24 | 25 mer |
| 117 | AACTGACCCTGTAAAGTTAAAAACT | SHANK3 H22A(+1699+1723) 1mm_25 | 25 mer |
| 118 | AATTGACCCTGTAAAGTTAAAAACC | SHANK3 H22A(+1699+1723) 1mm_3 | 25 mer |
| 119 | AACTTACCCTGTAAAGTTAAAAACC | SHANK3 H22A(+1699+1723) 1mm_5 | 25 mer |
| 120 | AACTGATCCTGTAAAGTTAAAAACC | SHANK3 H22A(+1699+1723) 1mm_7 | 25 mer |
| 121 | AACTGACTCTGTAAAGTTAAAAACC | SHANK3 H22A(+1699+1723) 1mm_8 | 25 mer |
| 122 | AACTGACCTTGTAAAGTTAAAAACC | SHANK3 H22A(+1699+1723) 1mm_9 | 25 mer |
| 123 | AACTAACCCTGTAAAATTAAAAACC | SHANK3 H22A(+1699+1723) 2mm_5_16 | 25 mer |
| 124 | AACTGACCCTGTAAAATTAAAAACC | SHANK3 H22A(+1699+1723) mm1 | 25 mer |
| 125 | AACTGACCCTATAAAATTAAAAACC | SHANK3 H22A(+1699+1723) mm2 | 25 mer |
| 126 | GAACTGACCCTGTAAAGTTAAAAAC | SHANK3 H22A(+1700+1724) | 25 mer |
| 127 | TAACTGACCCTGTAAAGTTAAAAAC | SHANK3 H22A(+1700+1724) 1mm_1 | 25 mer |
| 128 | GAACTGACCTTGTAAAGTTAAAAAC | SHANK3 H22A(+1700+1724) 1mm_10 | 25 mer |
| 129 | GAACTGACCCTTTAAAGTTAAAAAC | SHANK3 H22A(+1700+1724) 1mm_12 | 25 mer |
| 130 | GAACTGACCCTGTAAATTTAAAAAC | SHANK3 H22A(+1700+1724) 1mm_17 | 25 mer |
| 131 | GAACTGACCCTGTAAAGTTAAAAAT | SHANK3 H22A(+1700+1724) 1mm_25 | 25 mer |
| 132 | GAATTGACCCTGTAAAGTTAAAAAC | SHANK3 H22A(+1700+1724) 1mm_4 | 25 mer |
| 133 | GAACTTACCCTGTAAAGTTAAAAAC | SHANK3 H22A(+1700+1724) 1mm_6 | 25 mer |
| 134 | GAACTGATCCTGTAAAGTTAAAAAC | SHANK3 H22A(+1700+1724) 1mm_8 | 25 mer |
| 135 | GAACTGACTCTGTAAAGTTAAAAAC | SHANK3 H22A(+1700+1724) 1mm_9 | 25 mer |
| 136 | AAACTGACCCTATAAAGTTAAAAAC | SHANK3 H22A(+1700+1724) 2mm_1_12 | 25 mer |
| 137 | AAACTGACCCTGTAAAATTAAAAAC | SHANK3 H22A(+1700+1724) 2mm_1_17 | 25 mer |
| 138 | AAACTAACCCTGTAAAGTTAAAAAC | SHANK3 H22A(+1700+1724) 2mm_1_6 | 25 mer |
| 139 | GAACTAACCCTGTAAAATTAAAAAC | SHANK3 H22A(+1700+1724) 2mm_6_17 | 25 mer |
| 140 | GAACTGACCCTGTAAAATTAAAAAC | SHANK3 H22A(+1700+1724) mm1 | 25 mer |
| 141 | GAACTGACCCTATAAAATTAAAAAC | SHANK3 H22A(+1700+1724) mm2 | 25 mer |
| 142 | GGAACTGACCCTGTAAAGTTAAAAA | SHANK3 H22A(+1701+1725) | 25 mer |
| 143 | TGAACTGACCCTGTAAAGTTAAAAA | SHANK3 H22A(+1701+1725) 1mm_1 | 25 mer |
| 144 | GGAACTGACTCTGTAAAGTTAAAAA | SHANK3 H22A(+1701+1725) 1mm_10 | 25 mer |
| 145 | GGAACTGACCTTGTAAAGTTAAAAA | SHANK3 H22A(+1701+1725) 1mm_11 | 25 mer |
| 146 | GGAACTGACCCTTTAAAGTTAAAAA | SHANK3 H22A(+1701+1725) 1mm_13 | 25 mer |
| 147 | GGAACTGACCCTGTAAATTTAAAAA | SHANK3 H22A(+1701+1725) 1mm_18 | 25 mer |
| 148 | GTAACTGACCCTGTAAAGTTAAAAA | SHANK3 H22A(+1701+1725) 1mm_2 | 25 mer |
| 149 | GGAATTGACCCTGTAAAGTTAAAAA | SHANK3 H22A(+1701+1725) 1mm_5 | 25 mer |
| 150 | GGAACTTACCCTGTAAAGTTAAAAA | SHANK3 H22A(+1701+1725) 1mm_7 | 25 mer |
| 151 | GGAACTGATCCTGTAAAGTTAAAAA | SHANK3 H22A(+1701+1725) 1mm_9 | 25 mer |
| 152 | AGAACTGACCCTATAAAGTTAAAAA | SHANK3 H22A(+1701+1725) 2mm_1_13 | 25 mer |
| 153 | AGAACTGACCCTGTAAAATTAAAAA | SHANK3 H22A(+1701+1725) 2mm_1_18 | 25 mer |
| 154 | AAAACTGACCCTGTAAAGTTAAAAA | SHANK3 H22A(+1701+1725) 2mm_1_2 | 25 mer |
| 155 | AGAACTAACCCTGTAAAGTTAAAAA | SHANK3 H22A(+1701+1725) 2mm_1_7 | 25 mer |
| 156 | GAAACTGACCCTATAAAGTTAAAAA | SHANK3 H22A(+1701+1725) 2mm_2_13 | 25 mer |
| 157 | GAAACTGACCCTGTAAAATTAAAAA | SHANK3 H22A(+1701+1725) 2mm_2_18 | 25 mer |
| 158 | GAAACTAACCCTGTAAAGTTAAAAA | SHANK3 H22A(+1701+1725) 2mm_2_7 | 25 mer |
| 159 | GGAACTAACCCTGTAAAATTAAAAA | SHANK3 H22A(+1701+1725) 2mm_7_18 | 25 mer |
| 160 | GGAACTGACCCTGTAAAATTAAAAA | SHANK3 H22A(+1701+1725) mm1 | 25 mer |
| 161 | GGAACTGACCCTATAAAATTAAAAA | SHANK3 H22A(+1701+1725) mm2 | 25 mer |
| 162 | TGGAACTGACCCTGTAAAGTTAAAA | SHANK3 H22A(+1702+1726) 1mm_1 | 25 mer |
| 163 | CGGAACTGATCCTGTAAAGTTAAAA | SHANK3 H22A(+1702+1726) 1mm_10 | 25 mer |
| 164 | CGGAACTGACTCTGTAAAGTTAAAA | SHANK3 H22A(+1702+1726) 1mm_11 | 25 mer |
| 165 | CGGAACTGACCTTGTAAAGTTAAAA | SHANK3 H22A(+1702+1726) 1mm_12 | 25 mer |
| 166 | CGGAACTGACCCTTTAAAGTTAAAA | SHANK3 H22A(+1702+1726) 1mm_14 | 25 mer |
| 167 | CGGAACTGACCCTGTAAATTTAAAA | SHANK3 H22A(+1702+1726) 1mm_19 | 25 mer |
| 168 | CTGAACTGACCCTGTAAAGTTAAAA | SHANK3 H22A(+1702+1726) 1mm_2 | 25 mer |
| 169 | CGTAACTGACCCTGTAAAGTTAAAA | SHANK3 H22A(+1702+1726) 1mm_3 | 25 mer |
| 170 | CGGAATTGACCCTGTAAAGTTAAAA | SHANK3 H22A(+1702+1726) 1mm_6 | 25 mer |
| 171 | CGGAACTTACCCTGTAAAGTTAAAA | SHANK3 H22A(+1702+1726) 1mm_8 | 25 mer |
| 172 | CAGAACTGACCCTATAAAGTTAAAA | SHANK3 H22A(+1702+1726) 2mm_2_14 | 25 mer |
| 173 | CAGAACTGACCCTGTAAAATTAAAA | SHANK3 H22A(+1702+1726) 2mm_2_19 | 25 mer |
| 174 | CAAAACTGACCCTGTAAAGTTAAAA | SHANK3 H22A(+1702+1726) 2mm_2_3 | 25 mer |
| 175 | CAGAACTAACCCTGTAAAGTTAAAA | SHANK3 H22A(+1702+1726) 2mm_2_8 | 25 mer |
| 176 | CGAAACTGACCCTATAAAGTTAAAA | SHANK3 H22A(+1702+1726) 2mm_3_14 | 25 mer |
| 177 | CGAAACTGACCCTGTAAAATTAAAA | SHANK3 H22A(+1702+1726) 2mm_3_19 | 25 mer |
| 178 | CGAAACTAACCCTGTAAAGTTAAAA | SHANK3 H22A(+1702+1726) 2mm_3_8 | 25 mer |
| 179 | CGGAACTAACCCTGTAAAATTAAAA | SHANK3 H22A(+1702+1726) 2mm_8_19 | 25 mer |
| 180 | CGGAACTGACCCTGTAAAATTAAAA | SHANK3 H22A(+1702+1726) mm1 | 25 mer |
| 181 | CGGAACTGACCCTATAAAATTAAAA | SHANK3 H22A(+1702+1726) mm2 | 25 mer |
| 182 | GCGGAACTGACCCTGTAAAGTTAAA | SHANK3 H22A(+1703+1727) | 25 mer |
| 183 | TCGGAACTGACCCTGTAAAGTTAAA | SHANK3 H22A(+1703+1727) 1mm_1 | 25 mer |
| 184 | GCGGAACTGATCCTGTAAAGTTAAA | SHANK3 H22A(+1703+1727) 1mm_11 | 25 mer |
| 185 | GCGGAACTGACTCTGTAAAGTTAAA | SHANK3 H22A(+1703+1727) 1mm_12 | 25 mer |
| 186 | GCGGAACTGACCTTGTAAAGTTAAA | SHANK3 H22A(+1703+1727) 1mm_13 | 25 mer |
| 187 | GCGGAACTGACCCTTTAAAGTTAAA | SHANK3 H22A(+1703+1727) 1mm_15 | 25 mer |
| 188 | GTGGAACTGACCCTGTAAAGTTAAA | SHANK3 H22A(+1703+1727) 1mm_2 | 25 mer |
| 189 | GCGGAACTGACCCTGTAAATTTAAA | SHANK3 H22A(+1703+1727) 1mm_20 | 25 mer |
| 190 | GCTGAACTGACCCTGTAAAGTTAAA | SHANK3 H22A(+1703+1727) 1mm_3 | 25 mer |
| 191 | GCGTAACTGACCCTGTAAAGTTAAA | SHANK3 H22A(+1703+1727) 1mm_4 | 25 mer |
| 192 | GCGGAATTGACCCTGTAAAGTTAAA | SHANK3 H22A(+1703+1727) 1mm_7 | 25 mer |
| 193 | GCGGAACTTACCCTGTAAAGTTAAA | SHANK3 H22A(+1703+1727) 1mm_9 | 25 mer |
| 194 | ACGGAACTGACCCTATAAAGTTAAA | SHANK3 H22A(+1703+1727) 2mm_1_15 | 25 mer |
| 195 | ACGGAACTGACCCTGTAAAATTAAA | SHANK3 H22A(+1703+1727) 2mm_1_20 | 25 mer |
| 196 | ACAGAACTGACCCTGTAAAGTTAAA | SHANK3 H22A(+1703+1727) 2mm_1_3 | 25 mer |
| 197 | ACGAAACTGACCCTGTAAAGTTAAA | SHANK3 H22A(+1703+1727) 2mm_1_4 | 25 mer |
| 198 | ACGGAACTAACCCTGTAAAGTTAAA | SHANK3 H22A(+1703+1727) 2mm_1_9 | 25 mer |
| 199 | GCAGAACTGACCCTATAAAGTTAAA | SHANK3 H22A(+1703+1727) 2mm_3_15 | 25 mer |
| 200 | GCAGAACTGACCCTGTAAAATTAAA | SHANK3 H22A(+1703+1727) 2mm_3_20 | 25 mer |
| 201 | GCAAAACTGACCCTGTAAAGTTAAA | SHANK3 H22A(+1703+1727) 2mm_3_4 | 25 mer |
| 202 | GCAGAACTAACCCTGTAAAGTTAAA | SHANK3 H22A(+1703+1727) 2mm_3_9 | 25 mer |
| 203 | GCGAAACTGACCCTATAAAGTTAAA | SHANK3 H22A(+1703+1727) 2mm_4_15 | 25 mer |
| 204 | GCGAAACTGACCCTGTAAAATTAAA | SHANK3 H22A(+1703+1727) 2mm_4_20 | 25 mer |
| 205 | GCGAAACTAACCCTGTAAAGTTAAA | SHANK3 H22A(+1703+1727) 2mm_4_9 | 25 mer |
| 206 | GCGGAACTAACCCTGTAAAATTAAA | SHANK3 H22A(+1703+1727) 2mm_9_20 | 25 mer |
| 207 | GCGGAACTGACCCTGTAAAATTAAA | SHANK3 H22A(+1703+1727) mm1 | 25 mer |
| 208 | GCGGAACTGACCCTATAAAATTAAA | SHANK3 H22A(+1703+1727) mm2 | 25 mer |
| 209 | AGCGGAACTGACCCTGTAAAGTTAA | SHANK3 H22A(+1704+1728) | 25 mer |
| 210 | AGCGGAACTTACCCTGTAAAGTTAA | SHANK3 H22A(+1704+1728) 1mm_10 | 25 mer |
| 211 | AGCGGAACTGATCCTGTAAAGTTAA | SHANK3 H22A(+1704+1728) 1mm_12 | 25 mer |
| 212 | AGCGGAACTGACTCTGTAAAGTTAA | SHANK3 H22A(+1704+1728) 1mm_13 | 25 mer |
| 213 | AGCGGAACTGACCTTGTAAAGTTAA | SHANK3 H22A(+1704+1728) 1mm_14 | 25 mer |
| 214 | AGCGGAACTGACCCTTTAAAGTTAA | SHANK3 H22A(+1704+1728) 1mm_16 | 25 mer |
| 215 | ATCGGAACTGACCCTGTAAAGTTAA | SHANK3 H22A(+1704+1728) 1mm_2 | 25 mer |
| 216 | AGCGGAACTGACCCTGTAAATTTAA | SHANK3 H22A(+1704+1728) 1mm_21 | 25 mer |
| 217 | AGTGGAACTGACCCTGTAAAGTTAA | SHANK3 H22A(+1704+1728) 1mm_3 | 25 mer |
| 218 | AGCTGAACTGACCCTGTAAAGTTAA | SHANK3 H22A(+1704+1728) 1mm_4 | 25 mer |
| 219 | AGCGTAACTGACCCTGTAAAGTTAA | SHANK3 H22A(+1704+1728) 1mm_5 | 25 mer |
| 220 | AGCGGAATTGACCCTGTAAAGTTAA | SHANK3 H22A(+1704+1728) 1mm_8 | 25 mer |
| 221 | AGCGGAACTAACCCTGTAAAATTAA | SHANK3 H22A(+1704+1728) 2mm_10_21 | 25 mer |
| 222 | AACGGAACTAACCCTGTAAAGTTAA | SHANK3 H22A(+1704+1728) 2mm_2_10 | 25 mer |
| 223 | AACGGAACTGACCCTATAAAGTTAA | SHANK3 H22A(+1704+1728) 2mm_2_16 | 25 mer |
| 224 | AACGGAACTGACCCTGTAAAATTAA | SHANK3 H22A(+1704+1728) 2mm_2_21 | 25 mer |
| 225 | AACAGAACTGACCCTGTAAAGTTAA | SHANK3 H22A(+1704+1728) 2mm_2_4 | 25 mer |
| 226 | AACGAAACTGACCCTGTAAAGTTAA | SHANK3 H22A(+1704+1728) 2mm_2_5 | 25 mer |
| 227 | AGCAGAACTAACCCTGTAAAGTTAA | SHANK3 H22A(+1704+1728) 2mm_4_10 | 25 mer |
| 228 | AGCAGAACTGACCCTATAAAGTTAA | SHANK3 H22A(+1704+1728) 2mm_4_16 | 25 mer |
| 229 | AGCAGAACTGACCCTGTAAAATTAA | SHANK3 H22A(+1704+1728) 2mm_4_21 | 25 mer |
| 230 | AGCAAAACTGACCCTGTAAAGTTAA | SHANK3 H22A(+1704+1728) 2mm_4_5 | 25 mer |
| 231 | AGCGAAACTAACCCTGTAAAGTTAA | SHANK3 H22A(+1704+1728) 2mm_5_10 | 25 mer |
| 232 | AGCGAAACTGACCCTATAAAGTTAA | SHANK3 H22A(+1704+1728) 2mm_5_16 | 25 mer |
| 233 | AGCGAAACTGACCCTGTAAAATTAA | SHANK3 H22A(+1704+1728) 2mm_5_21 | 25 mer |
| 234 | AGCGGAACTGACCCTGTAAAATTAA | SHANK3 H22A(+1704+1728) mm1 | 25 mer |
| 235 | AGCGGAACTGACCCTATAAAATTAA | SHANK3 H22A(+1704+1728) mm2 | 25 mer |
| 236 | AAGCGGAACTTACCCTGTAAAGTTA | SHANK3 H22A(+1705+1729) 1mm_11 | 25 mer |
| 237 | AAGCGGAACTGATCCTGTAAAGTTA | SHANK3 H22A(+1705+1729) 1mm_13 | 25 mer |
| 238 | AAGCGGAACTGACTCTGTAAAGTTA | SHANK3 H22A(+1705+1729) 1mm_14 | 25 mer |
| 239 | AAGCGGAACTGACCTTGTAAAGTTA | SHANK3 H22A(+1705+1729) 1mm_15 | 25 mer |
| 240 | AAGCGGAACTGACCCTTTAAAGTTA | SHANK3 H22A(+1705+1729) 1mm_17 | 25 mer |
| 241 | AAGCGGAACTGACCCTGTAAATTTA | SHANK3 H22A(+1705+1729) 1mm_22 | 25 mer |
| 242 | AATCGGAACTGACCCTGTAAAGTTA | SHANK3 H22A(+1705+1729) 1mm_3 | 25 mer |
| 243 | AAGTGGAACTGACCCTGTAAAGTTA | SHANK3 H22A(+1705+1729) 1mm_4 | 25 mer |
| 244 | AAGCTGAACTGACCCTGTAAAGTTA | SHANK3 H22A(+1705+1729) 1mm_5 | 25 mer |
| 245 | AAGCGTAACTGACCCTGTAAAGTTA | SHANK3 H22A(+1705+1729) 1mm_6 | 25 mer |
| 246 | AAGCGGAATTGACCCTGTAAAGTTA | SHANK3 H22A(+1705+1729) 1mm_9 | 25 mer |
| 247 | AAGCGGAACTAACCCTGTAAAATTA | SHANK3 H22A(+1705+1729) 2mm_11_22 | 25 mer |
| 248 | AAACGGAACTAACCCTGTAAAGTTA | SHANK3 H22A(+1705+1729) 2mm_3_11 | 25 mer |
| 249 | AAACGGAACTGACCCTATAAAGTTA | SHANK3 H22A(+1705+1729) 2mm_3_17 | 25 mer |
| 250 | AAACGGAACTGACCCTGTAAAATTA | SHANK3 H22A(+1705+1729) 2mm_3_22 | 25 mer |
| 251 | AAACAGAACTGACCCTGTAAAGTTA | SHANK3 H22A(+1705+1729) 2mm_3_5 | 25 mer |
| 252 | AAACGAAACTGACCCTGTAAAGTTA | SHANK3 H22A(+1705+1729) 2mm_3_6 | 25 mer |
| 253 | AAGCAGAACTAACCCTGTAAAGTTA | SHANK3 H22A(+1705+1729) 2mm_5_11 | 25 mer |
| 254 | AAGCAGAACTGACCCTATAAAGTTA | SHANK3 H22A(+1705+1729) 2mm_5_17 | 25 mer |
| 255 | AAGCAGAACTGACCCTGTAAAATTA | SHANK3 H22A(+1705+1729) 2mm_5_22 | 25 mer |
| 256 | AAGCAAAACTGACCCTGTAAAGTTA | SHANK3 H22A(+1705+1729) 2mm_5_6 | 25 mer |
| 257 | AAGCGAAACTAACCCTGTAAAGTTA | SHANK3 H22A(+1705+1729) 2mm_6_11 | 25 mer |
| 258 | AAGCGAAACTGACCCTATAAAGTTA | SHANK3 H22A(+1705+1729) 2mm_6_17 | 25 mer |
| 259 | AAGCGAAACTGACCCTGTAAAATTA | SHANK3 H22A(+1705+1729) 2mm_6_22 | 25 mer |
| 260 | AAGCGGAACTGACCCTGTAAAATTA | SHANK3 H22A(+1705+1729) mm1 | 25 mer |
| 261 | AAGCGGAACTGACCCTATAAAATTA | SHANK3 H22A(+1705+1729) mm2 | 25 mer |
| 262 | GAAGCGGAACTGACCCTGTAAAGTT | SHANK3 H22A(+1706+1730) | 25 mer |
| 263 | TAAGCGGAACTGACCCTGTAAAGTT | SHANK3 H22A(+1706+1730) 1mm_1 | 25 mer |
| 264 | GAAGCGGAATTGACCCTGTAAAGTT | SHANK3 H22A(+1706+1730) 1mm_10 | 25 mer |
| 265 | GAAGCGGAACTTACCCTGTAAAGTT | SHANK3 H22A(+1706+1730) 1mm_12 | 25 mer |
| 266 | GAAGCGGAACTGATCCTGTAAAGTT | SHANK3 H22A(+1706+1730) 1mm_14 | 25 mer |
| 267 | GAAGCGGAACTGACTCTGTAAAGTT | SHANK3 H22A(+1706+1730) 1mm_15 | 25 mer |
| 268 | GAAGCGGAACTGACCTTGTAAAGTT | SHANK3 H22A(+1706+1730) 1mm_16 | 25 mer |
| 269 | GAAGCGGAACTGACCCTTTAAAGTT | SHANK3 H22A(+1706+1730) 1mm_18 | 25 mer |
| 270 | GAAGCGGAACTGACCCTGTAAATTT | SHANK3 H22A(+1706+1730) 1mm_23 | 25 mer |
| 271 | GAATCGGAACTGACCCTGTAAAGTT | SHANK3 H22A(+1706+1730) 1mm_4 | 25 mer |
| 272 | GAAGTGGAACTGACCCTGTAAAGTT | SHANK3 H22A(+1706+1730) 1mm_5 | 25 mer |
| 273 | GAAGCTGAACTGACCCTGTAAAGTT | SHANK3 H22A(+1706+1730) 1mm_6 | 25 mer |
| 274 | GAAGCGTAACTGACCCTGTAAAGTT | SHANK3 H22A(+1706+1730) 1mm_7 | 25 mer |
| 275 | AAAGCGGAACTAACCCTGTAAAGTT | SHANK3 H22A(+1706+1730) 2mm_1_12 | 25 mer |
| 276 | AAAGCGGAACTGACCCTATAAAGTT | SHANK3 H22A(+1706+1730) 2mm_1_18 | 25 mer |
| 277 | AAAGCGGAACTGACCCTGTAAAATT | SHANK3 H22A(+1706+1730) 2mm_1_23 | 25 mer |
| 278 | AAAACGGAACTGACCCTGTAAAGTT | SHANK3 H22A(+1706+1730) 2mm_1_4 | 25 mer |
| 279 | AAAGCAGAACTGACCCTGTAAAGTT | SHANK3 H22A(+1706+1730) 2mm_1_6 | 25 mer |
| 280 | AAAGCGAAACTGACCCTGTAAAGTT | SHANK3 H22A(+1706+1730) 2mm_1_7 | 25 mer |
| 281 | GAAGCGGAACTAACCCTGTAAAATT | SHANK3 H22A(+1706+1730) 2mm_12_23 | 25 mer |
| 282 | GAAACGGAACTAACCCTGTAAAGTT | SHANK3 H22A(+1706+1730) 2mm_4_12 | 25 mer |
| 283 | GAAACGGAACTGACCCTATAAAGTT | SHANK3 H22A(+1706+1730) 2mm_4_18 | 25 mer |
| 284 | GAAACGGAACTGACCCTGTAAAATT | SHANK3 H22A(+1706+1730) 2mm_4_23 | 25 mer |
| 285 | GAAACAGAACTGACCCTGTAAAGTT | SHANK3 H22A(+1706+1730) 2mm_4_6 | 25 mer |
| 286 | GAAACGAAACTGACCCTGTAAAGTT | SHANK3 H22A(+1706+1730) 2mm_4_7 | 25 mer |
| 287 | GAAGCAGAACTAACCCTGTAAAGTT | SHANK3 H22A(+1706+1730) 2mm_6_12 | 25 mer |
| 288 | GAAGCAGAACTGACCCTATAAAGTT | SHANK3 H22A(+1706+1730) 2mm_6_18 | 25 mer |
| 289 | GAAGCAGAACTGACCCTGTAAAATT | SHANK3 H22A(+1706+1730) 2mm_6_23 | 25 mer |
| 290 | GAAGCAAAACTGACCCTGTAAAGTT | SHANK3 H22A(+1706+1730) 2mm_6_7 | 25 mer |
| 291 | GAAGCGAAACTAACCCTGTAAAGTT | SHANK3 H22A(+1706+1730) 2mm_7_12 | 25 mer |
| 292 | GAAGCGAAACTGACCCTATAAAGTT | SHANK3 H22A(+1706+1730) 2mm_7_18 | 25 mer |
| 293 | GAAGCGAAACTGACCCTGTAAAATT | SHANK3 H22A(+1706+1730) 2mm_7_23 | 25 mer |
| 294 | GAAGCGGAACTGACCCTGTAAAATT | SHANK3 H22A(+1706+1730) mm1 | 25 mer |
| 295 | GAAGCGGAACTGACCCTATAAAATT | SHANK3 H22A(+1706+1730) mm2 | 25 mer |
| 296 | TGAAGCGGAATTGACCCTGTAAAGT | SHANK3 H22A(+1707+1731) 1mm_11 | 25 mer |
| 297 | TGAAGCGGAACTTACCCTGTAAAGT | SHANK3 H22A(+1707+1731) 1mm_13 | 25 mer |
| 298 | TGAAGCGGAACTGATCCTGTAAAGT | SHANK3 H22A(+1707+1731) 1mm_15 | 25 mer |
| 299 | TGAAGCGGAACTGACTCTGTAAAGT | SHANK3 H22A(+1707+1731) 1mm_16 | 25 mer |
| 300 | TGAAGCGGAACTGACCTTGTAAAGT | SHANK3 H22A(+1707+1731) 1mm_17 | 25 mer |
| 301 | TGAAGCGGAACTGACCCTTTAAAGT | SHANK3 H22A(+1707+1731) 1mm_19 | 25 mer |
| 302 | TTAAGCGGAACTGACCCTGTAAAGT | SHANK3 H22A(+1707+1731) 1mm_2 | 25 mer |
| 303 | TGAAGCGGAACTGACCCTGTAAATT | SHANK3 H22A(+1707+1731) 1mm_24 | 25 mer |
| 304 | TGAATCGGAACTGACCCTGTAAAGT | SHANK3 H22A(+1707+1731) 1mm_5 | 25 mer |
| 305 | TGAAGTGGAACTGACCCTGTAAAGT | SHANK3 H22A(+1707+1731) 1mm_6 | 25 mer |
| 306 | TGAAGCTGAACTGACCCTGTAAAGT | SHANK3 H22A(+1707+1731) 1mm_7 | 25 mer |
| 307 | TGAAGCGTAACTGACCCTGTAAAGT | SHANK3 H22A(+1707+1731) 1mm_8 | 25 mer |
| 308 | TGAAGCGGAACTAACCCTGTAAAAT | SHANK3 H22A(+1707+1731) 2mm_13_24 | 25 mer |
| 309 | TAAAGCGGAACTAACCCTGTAAAGT | SHANK3 H22A(+1707+1731) 2mm_2_13 | 25 mer |
| 310 | TAAAGCGGAACTGACCCTATAAAGT | SHANK3 H22A(+1707+1731) 2mm_2_19 | 25 mer |
| 311 | TAAAGCGGAACTGACCCTGTAAAAT | SHANK3 H22A(+1707+1731) 2mm_2_24 | 25 mer |
| 312 | TAAAACGGAACTGACCCTGTAAAGT | SHANK3 H22A(+1707+1731) 2mm_2_5 | 25 mer |
| 313 | TAAAGCAGAACTGACCCTGTAAAGT | SHANK3 H22A(+1707+1731) 2mm_2_7 | 25 mer |
| 314 | TAAAGCGAAACTGACCCTGTAAAGT | SHANK3 H22A(+1707+1731) 2mm_2_8 | 25 mer |
| 315 | TGAAACGGAACTAACCCTGTAAAGT | SHANK3 H22A(+1707+1731) 2mm_5_13 | 25 mer |
| 316 | TGAAACGGAACTGACCCTATAAAGT | SHANK3 H22A(+1707+1731) 2mm_5_19 | 25 mer |
| 317 | TGAAACGGAACTGACCCTGTAAAAT | SHANK3 H22A(+1707+1731) 2mm_5_24 | 25 mer |
| 318 | TGAAACAGAACTGACCCTGTAAAGT | SHANK3 H22A(+1707+1731) 2mm_5_7 | 25 mer |
| 319 | TGAAACGAAACTGACCCTGTAAAGT | SHANK3 H22A(+1707+1731) 2mm_5_8 | 25 mer |
| 320 | TGAAGCAGAACTAACCCTGTAAAGT | SHANK3 H22A(+1707+1731) 2mm_7_13 | 25 mer |
| 321 | TGAAGCAGAACTGACCCTATAAAGT | SHANK3 H22A(+1707+1731) 2mm_7_19 | 25 mer |
| 322 | TGAAGCAGAACTGACCCTGTAAAAT | SHANK3 H22A(+1707+1731) 2mm_7_24 | 25 mer |
| 323 | TGAAGCAAAACTGACCCTGTAAAGT | SHANK3 H22A(+1707+1731) 2mm_7_8 | 25 mer |
| 324 | TGAAGCGAAACTAACCCTGTAAAGT | SHANK3 H22A(+1707+1731) 2mm_8_13 | 25 mer |
| 325 | TGAAGCGAAACTGACCCTATAAAGT | SHANK3 H22A(+1707+1731) 2mm_8_19 | 25 mer |
| 326 | TGAAGCGAAACTGACCCTGTAAAAT | SHANK3 H22A(+1707+1731) 2mm_8_24 | 25 mer |
| 327 | TGAAGCGGAACTGACCCTGTAAAAT | SHANK3 H22A(+1707+1731) mm1 | 25 mer |
| 328 | TGAAGCGGAACTGACCCTATAAAAT | SHANK3 H22A(+1707+1731) mm2 | 25 mer |
| 329 | TTGAAGCGGAACTGACCCTGTAAAG | SHANK3 H22A(+1708+1732) 1mm_1 | 25 mer |
| 330 | GTGAAGCGGAATTGACCCTGTAAAG | SHANK3 H22A(+1708+1732) 1mm_12 | 25 mer |
| 331 | GTGAAGCGGAACTTACCCTGTAAAG | SHANK3 H22A(+1708+1732) 1mm_14 | 25 mer |
| 332 | GTGAAGCGGAACTGATCCTGTAAAG | SHANK3 H22A(+1708+1732) 1mm_16 | 25 mer |
| 333 | GTGAAGCGGAACTGACTCTGTAAAG | SHANK3 H22A(+1708+1732) 1mm_17 | 25 mer |
| 334 | GTGAAGCGGAACTGACCTTGTAAAG | SHANK3 H22A(+1708+1732) 1mm_18 | 25 mer |
| 335 | GTGAAGCGGAACTGACCCTTTAAAG | SHANK3 H22A(+1708+1732) 1mm_20 | 25 mer |
| 336 | GTTAAGCGGAACTGACCCTGTAAAG | SHANK3 H22A(+1708+1732) 1mm_3 | 25 mer |
| 337 | GTGAATCGGAACTGACCCTGTAAAG | SHANK3 H22A(+1708+1732) 1mm_6 | 25 mer |
| 338 | GTGAAGTGGAACTGACCCTGTAAAG | SHANK3 H22A(+1708+1732) 1mm_7 | 25 mer |
| 339 | GTGAAGCTGAACTGACCCTGTAAAG | SHANK3 H22A(+1708+1732) 1mm_8 | 25 mer |
| 340 | GTGAAGCGTAACTGACCCTGTAAAG | SHANK3 H22A(+1708+1732) 1mm_9 | 25 mer |
| 341 | ATGAAGCGGAACTAACCCTGTAAAG | SHANK3 H22A(+1708+1732) 2mm_1_14 | 25 mer |
| 342 | ATGAAGCGGAACTGACCCTATAAAG | SHANK3 H22A(+1708+1732) 2mm_1_20 | 25 mer |
| 343 | ATGAAGCGGAACTGACCCTGTAAAA | SHANK3 H22A(+1708+1732) 2mm_1_25 | 25 mer |
| 344 | ATAAAGCGGAACTGACCCTGTAAAG | SHANK3 H22A(+1708+1732) 2mm_1_3 | 25 mer |
| 345 | ATGAAACGGAACTGACCCTGTAAAG | SHANK3 H22A(+1708+1732) 2mm_1_6 | 25 mer |
| 346 | ATGAAGCAGAACTGACCCTGTAAAG | SHANK3 H22A(+1708+1732) 2mm_1_8 | 25 mer |
| 347 | ATGAAGCGAAACTGACCCTGTAAAG | SHANK3 H22A(+1708+1732) 2mm_1_9 | 25 mer |
| 348 | GTGAAGCGGAACTAACCCTGTAAAA | SHANK3 H22A(+1708+1732) 2mm_14_25 | 25 mer |
| 349 | GTAAAGCGGAACTAACCCTGTAAAG | SHANK3 H22A(+1708+1732) 2mm_3_14 | 25 mer |
| 350 | GTAAAGCGGAACTGACCCTATAAAG | SHANK3 H22A(+1708+1732) 2mm_3_20 | 25 mer |
| 351 | GTAAAGCGGAACTGACCCTGTAAAA | SHANK3 H22A(+1708+1732) 2mm_3_25 | 25 mer |
| 352 | GTAAAACGGAACTGACCCTGTAAAG | SHANK3 H22A(+1708+1732) 2mm_3_6 | 25 mer |
| 353 | GTAAAGCAGAACTGACCCTGTAAAG | SHANK3 H22A(+1708+1732) 2mm_3_8 | 25 mer |
| 354 | GTAAAGCGAAACTGACCCTGTAAAG | SHANK3 H22A(+1708+1732) 2mm_3_9 | 25 mer |
| 355 | GTGAAACGGAACTAACCCTGTAAAG | SHANK3 H22A(+1708+1732) 2mm_6_14 | 25 mer |
| 356 | GTGAAACGGAACTGACCCTATAAAG | SHANK3 H22A(+1708+1732) 2mm_6_20 | 25 mer |
| 357 | GTGAAACGGAACTGACCCTGTAAAA | SHANK3 H22A(+1708+1732) 2mm_6_25 | 25 mer |
| 358 | GTGAAACAGAACTGACCCTGTAAAG | SHANK3 H22A(+1708+1732) 2mm_6_8 | 25 mer |
| 359 | GTGAAACGAAACTGACCCTGTAAAG | SHANK3 H22A(+1708+1732) 2mm_6_9 | 25 mer |
| 360 | GTGAAGCAGAACTAACCCTGTAAAG | SHANK3 H22A(+1708+1732) 2mm_8_14 | 25 mer |
| 361 | GTGAAGCAGAACTGACCCTATAAAG | SHANK3 H22A(+1708+1732) 2mm_8_20 | 25 mer |
| 362 | GTGAAGCAGAACTGACCCTGTAAAA | SHANK3 H22A(+1708+1732) 2mm_8_25 | 25 mer |
| 363 | GTGAAGCAAAACTGACCCTGTAAAG | SHANK3 H22A(+1708+1732) 2mm_8_9 | 25 mer |
| 364 | GTGAAGCGAAACTAACCCTGTAAAG | SHANK3 H22A(+1708+1732) 2mm_9_14 | 25 mer |
| 365 | GTGAAGCGAAACTGACCCTATAAAG | SHANK3 H22A(+1708+1732) 2mm_9_20 | 25 mer |
| 366 | GTGAAGCGAAACTGACCCTGTAAAA | SHANK3 H22A(+1708+1732) 2mm_9_25 | 25 mer |
| 367 | GTGAAGCGGAACTGACCCTGTAAAA | SHANK3 H22A(+1708+1732) mm1 | 25 mer |
| 368 | GTGAAGCGGAACTGACCCTATAAAA | SHANK3 H22A(+1708+1732) mm2 | 25 mer |
| 369 | GGTGAAGCGGAACTGACCCTGTAAA | SHANK3 H22A(+1709+1733) | 25 mer |
| 370 | TGTGAAGCGGAACTGACCCTGTAAA | SHANK3 H22A(+1709+1733) 1mm_1 | 25 mer |
| 371 | GGTGAAGCGTAACTGACCCTGTAAA | SHANK3 H22A(+1709+1733) 1mm_10 | 25 mer |
| 372 | GGTGAAGCGGAATTGACCCTGTAAA | SHANK3 H22A(+1709+1733) 1mm_13 | 25 mer |
| 373 | GGTGAAGCGGAACTTACCCTGTAAA | SHANK3 H22A(+1709+1733) 1mm_15 | 25 mer |
| 374 | GGTGAAGCGGAACTGATCCTGTAAA | SHANK3 H22A(+1709+1733) 1mm_17 | 25 mer |
| 375 | GGTGAAGCGGAACTGACTCTGTAAA | SHANK3 H22A(+1709+1733) 1mm_18 | 25 mer |
| 376 | GGTGAAGCGGAACTGACCTTGTAAA | SHANK3 H22A(+1709+1733) 1mm_19 | 25 mer |
| 377 | GTTGAAGCGGAACTGACCCTGTAAA | SHANK3 H22A(+1709+1733) 1mm_2 | 25 mer |
| 378 | GGTGAAGCGGAACTGACCCTTTAAA | SHANK3 H22A(+1709+1733) 1mm_21 | 25 mer |
| 379 | GGTTAAGCGGAACTGACCCTGTAAA | SHANK3 H22A(+1709+1733) 1mm_4 | 25 mer |
| 380 | GGTGAATCGGAACTGACCCTGTAAA | SHANK3 H22A(+1709+1733) 1mm_7 | 25 mer |
| 381 | GGTGAAGTGGAACTGACCCTGTAAA | SHANK3 H22A(+1709+1733) 1mm_8 | 25 mer |
| 382 | GGTGAAGCTGAACTGACCCTGTAAA | SHANK3 H22A(+1709+1733) 1mm_9 | 25 mer |
| 383 | AGTGAAGCGAAACTGACCCTGTAAA | SHANK3 H22A(+1709+1733) 2mm_1_10 | 25 mer |
| 384 | AGTGAAGCGGAACTAACCCTGTAAA | SHANK3 H22A(+1709+1733) 2mm_1_15 | 25 mer |
| 385 | AATGAAGCGGAACTGACCCTGTAAA | SHANK3 H22A(+1709+1733) 2mm_1_2 | 25 mer |
| 386 | AGTGAAGCGGAACTGACCCTATAAA | SHANK3 H22A(+1709+1733) 2mm_1_21 | 25 mer |
| 387 | AGTAAAGCGGAACTGACCCTGTAAA | SHANK3 H22A(+1709+1733) 2mm_1_4 | 25 mer |
| 388 | AGTGAAACGGAACTGACCCTGTAAA | SHANK3 H22A(+1709+1733) 2mm_1_7 | 25 mer |
| 389 | AGTGAAGCAGAACTGACCCTGTAAA | SHANK3 H22A(+1709+1733) 2mm_1_9 | 25 mer |
| 390 | GGTGAAGCGAAACTAACCCTGTAAA | SHANK3 H22A(+1709+1733) 2mm_10_15 | 25 mer |
| 391 | GGTGAAGCGAAACTGACCCTATAAA | SHANK3 H22A(+1709+1733) 2mm_10_21 | 25 mer |
| 392 | GATGAAGCGAAACTGACCCTGTAAA | SHANK3 H22A(+1709+1733) 2mm_2_10 | 25 mer |
| 393 | GATGAAGCGGAACTAACCCTGTAAA | SHANK3 H22A(+1709+1733) 2mm_2_15 | 25 mer |
| 394 | GATGAAGCGGAACTGACCCTATAAA | SHANK3 H22A(+1709+1733) 2mm_2_21 | 25 mer |
| 395 | GATAAAGCGGAACTGACCCTGTAAA | SHANK3 H22A(+1709+1733) 2mm_2_4 | 25 mer |
| 396 | GATGAAACGGAACTGACCCTGTAAA | SHANK3 H22A(+1709+1733) 2mm_2_7 | 25 mer |
| 397 | GATGAAGCAGAACTGACCCTGTAAA | SHANK3 H22A(+1709+1733) 2mm_2_9 | 25 mer |
| 398 | GGTAAAGCGAAACTGACCCTGTAAA | SHANK3 H22A(+1709+1733) 2mm_4_10 | 25 mer |
| 399 | GGTAAAGCGGAACTAACCCTGTAAA | SHANK3 H22A(+1709+1733) 2mm_4_15 | 25 mer |
| 400 | GGTAAAGCGGAACTGACCCTATAAA | SHANK3 H22A(+1709+1733) 2mm_4_21 | 25 mer |
| 401 | GGTAAAACGGAACTGACCCTGTAAA | SHANK3 H22A(+1709+1733) 2mm_4_7 | 25 mer |
| 402 | GGTAAAGCAGAACTGACCCTGTAAA | SHANK3 H22A(+1709+1733) 2mm_4_9 | 25 mer |
| 403 | GGTGAAACGAAACTGACCCTGTAAA | SHANK3 H22A(+1709+1733) 2mm_7_10 | 25 mer |
| 404 | GGTGAAACGGAACTAACCCTGTAAA | SHANK3 H22A(+1709+1733) 2mm_7_15 | 25 mer |
| 405 | GGTGAAACGGAACTGACCCTATAAA | SHANK3 H22A(+1709+1733) 2mm_7_21 | 25 mer |
| 406 | GGTGAAACAGAACTGACCCTGTAAA | SHANK3 H22A(+1709+1733) 2mm_7_9 | 25 mer |
| 407 | GGTGAAGCAAAACTGACCCTGTAAA | SHANK3 H22A(+1709+1733) 2mm_9_10 | 25 mer |
| 408 | GGTGAAGCAGAACTAACCCTGTAAA | SHANK3 H22A(+1709+1733) 2mm_9_15 | 25 mer |
| 409 | GGTGAAGCAGAACTGACCCTATAAA | SHANK3 H22A(+1709+1733) 2mm_9_21 | 25 mer |
| 410 | GGTGAAGCGGAACTGACCCTATAAA | SHANK3 H22A(+1709+1733) mm1 | 25 mer |
| 411 | AGGTGAAGCGGAACTGACCCTGTAA | SHANK3 H22A(+1710+1734) | 25 mer |
| 412 | AGGTGAAGCTGAACTGACCCTGTAA | SHANK3 H22A(+1710+1734) 1mm_10 | 25 mer |
| 413 | AGGTGAAGCGTAACTGACCCTGTAA | SHANK3 H22A(+1710+1734) 1mm_11 | 25 mer |
| 414 | AGGTGAAGCGGAATTGACCCTGTAA | SHANK3 H22A(+1710+1734) 1mm_14 | 25 mer |
| 415 | AGGTGAAGCGGAACTTACCCTGTAA | SHANK3 H22A(+1710+1734) 1mm_16 | 25 mer |
| 416 | AGGTGAAGCGGAACTGATCCTGTAA | SHANK3 H22A(+1710+1734) 1mm_18 | 25 mer |
| 417 | AGGTGAAGCGGAACTGACTCTGTAA | SHANK3 H22A(+1710+1734) 1mm_19 | 25 mer |
| 418 | ATGTGAAGCGGAACTGACCCTGTAA | SHANK3 H22A(+1710+1734) 1mm_2 | 25 mer |
| 419 | AGGTGAAGCGGAACTGACCTTGTAA | SHANK3 H22A(+1710+1734) 1mm_20 | 25 mer |
| 420 | AGGTGAAGCGGAACTGACCCTTTAA | SHANK3 H22A(+1710+1734) 1mm_22 | 25 mer |
| 421 | AGTTGAAGCGGAACTGACCCTGTAA | SHANK3 H22A(+1710+1734) 1mm_3 | 25 mer |
| 422 | AGGTTAAGCGGAACTGACCCTGTAA | SHANK3 H22A(+1710+1734) 1mm_5 | 25 mer |
| 423 | AGGTGAATCGGAACTGACCCTGTAA | SHANK3 H22A(+1710+1734) 1mm_8 | 25 mer |
| 424 | AGGTGAAGTGGAACTGACCCTGTAA | SHANK3 H22A(+1710+1734) 1mm_9 | 25 mer |
| 425 | AGGTGAAGCAAAACTGACCCTGTAA | SHANK3 H22A(+1710+1734) 2mm_10_11 | 25 mer |
| 426 | AGGTGAAGCAGAACTAACCCTGTAA | SHANK3 H22A(+1710+1734) 2mm_10_16 | 25 mer |
| 427 | AGGTGAAGCAGAACTGACCCTATAA | SHANK3 H22A(+1710+1734) 2mm_10_22 | 25 mer |
| 428 | AGGTGAAGCGAAACTAACCCTGTAA | SHANK3 H22A(+1710+1734) 2mm_11_16 | 25 mer |
| 429 | AGGTGAAGCGAAACTGACCCTATAA | SHANK3 H22A(+1710+1734) 2mm_11_22 | 25 mer |
| 430 | AAGTGAAGCAGAACTGACCCTGTAA | SHANK3 H22A(+1710+1734) 2mm_2_10 | 25 mer |
| 431 | AAGTGAAGCGAAACTGACCCTGTAA | SHANK3 H22A(+1710+1734) 2mm_2_11 | 25 mer |
| 432 | AAGTGAAGCGGAACTAACCCTGTAA | SHANK3 H22A(+1710+1734) 2mm_2_16 | 25 mer |
| 433 | AAGTGAAGCGGAACTGACCCTATAA | SHANK3 H22A(+1710+1734) 2mm_2_22 | 25 mer |
| 434 | AAATGAAGCGGAACTGACCCTGTAA | SHANK3 H22A(+1710+1734) 2mm_2_3 | 25 mer |
| 435 | AAGTAAAGCGGAACTGACCCTGTAA | SHANK3 H22A(+1710+1734) 2mm_2_5 | 25 mer |
| 436 | AAGTGAAACGGAACTGACCCTGTAA | SHANK3 H22A(+1710+1734) 2mm_2_8 | 25 mer |
| 437 | AGATGAAGCAGAACTGACCCTGTAA | SHANK3 H22A(+1710+1734) 2mm_3_10 | 25 mer |
| 438 | AGATGAAGCGAAACTGACCCTGTAA | SHANK3 H22A(+1710+1734) 2mm_3_11 | 25 mer |
| 439 | AGATGAAGCGGAACTAACCCTGTAA | SHANK3 H22A(+1710+1734) 2mm_3_16 | 25 mer |
| 440 | AGATGAAGCGGAACTGACCCTATAA | SHANK3 H22A(+1710+1734) 2mm_3_22 | 25 mer |
| 441 | AGATAAAGCGGAACTGACCCTGTAA | SHANK3 H22A(+1710+1734) 2mm_3_5 | 25 mer |
| 442 | AGATGAAACGGAACTGACCCTGTAA | SHANK3 H22A(+1710+1734) 2mm_3_8 | 25 mer |
| 443 | AGGTAAAGCAGAACTGACCCTGTAA | SHANK3 H22A(+1710+1734) 2mm_5_10 | 25 mer |
| 444 | AGGTAAAGCGAAACTGACCCTGTAA | SHANK3 H22A(+1710+1734) 2mm_5_11 | 25 mer |
| 445 | AGGTAAAGCGGAACTAACCCTGTAA | SHANK3 H22A(+1710+1734) 2mm_5_16 | 25 mer |
| 446 | AGGTAAAGCGGAACTGACCCTATAA | SHANK3 H22A(+1710+1734) 2mm_5_22 | 25 mer |
| 447 | AGGTAAAACGGAACTGACCCTGTAA | SHANK3 H22A(+1710+1734) 2mm_5_8 | 25 mer |
| 448 | AGGTGAAACAGAACTGACCCTGTAA | SHANK3 H22A(+1710+1734) 2mm_8_10 | 25 mer |
| 449 | AGGTGAAACGAAACTGACCCTGTAA | SHANK3 H22A(+1710+1734) 2mm_8_11 | 25 mer |
| 450 | AGGTGAAACGGAACTAACCCTGTAA | SHANK3 H22A(+1710+1734) 2mm_8_16 | 25 mer |
| 451 | AGGTGAAACGGAACTGACCCTATAA | SHANK3 H22A(+1710+1734) 2mm_8_22 | 25 mer |
| 452 | AGGTGAAGCGGAACTGACCCTATAA | SHANK3 H22A(+1710+1734) mm1 | 25 mer |
| 453 | TAGGTGAAGCGGAACTGACCCTGTA | SHANK3 H22A(+1711+1735) 1mm_1 | 25 mer |
| 454 | GAGGTGAAGTGGAACTGACCCTGTA | SHANK3 H22A(+1711+1735) 1mm_10 | 25 mer |
| 455 | GAGGTGAAGCTGAACTGACCCTGTA | SHANK3 H22A(+1711+1735) 1mm_11 | 25 mer |
| 456 | GAGGTGAAGCGTAACTGACCCTGTA | SHANK3 H22A(+1711+1735) 1mm_12 | 25 mer |
| 457 | GAGGTGAAGCGGAATTGACCCTGTA | SHANK3 H22A(+1711+1735) 1mm_15 | 25 mer |
| 458 | GAGGTGAAGCGGAACTTACCCTGTA | SHANK3 H22A(+1711+1735) 1mm_17 | 25 mer |
| 459 | GAGGTGAAGCGGAACTGATCCTGTA | SHANK3 H22A(+1711+1735) 1mm_19 | 25 mer |
| 460 | GAGGTGAAGCGGAACTGACTCTGTA | SHANK3 H22A(+1711+1735) 1mm_20 | 25 mer |
| 461 | GAGGTGAAGCGGAACTGACCTTGTA | SHANK3 H22A(+1711+1735) 1mm_21 | 25 mer |
| 462 | GAGGTGAAGCGGAACTGACCCTTTA | SHANK3 H22A(+1711+1735) 1mm_23 | 25 mer |
| 463 | GATGTGAAGCGGAACTGACCCTGTA | SHANK3 H22A(+1711+1735) 1mm_3 | 25 mer |
| 464 | GAGTTGAAGCGGAACTGACCCTGTA | SHANK3 H22A(+1711+1735) 1mm_4 | 25 mer |
| 465 | GAGGTTAAGCGGAACTGACCCTGTA | SHANK3 H22A(+1711+1735) 1mm_6 | 25 mer |
| 466 | GAGGTGAATCGGAACTGACCCTGTA | SHANK3 H22A(+1711+1735) 1mm_9 | 25 mer |
| 467 | AAGGTGAAGCAGAACTGACCCTGTA | SHANK3 H22A(+1711+1735) 2mm_1_11 | 25 mer |
| 468 | AAGGTGAAGCGAAACTGACCCTGTA | SHANK3 H22A(+1711+1735) 2mm_1_12 | 25 mer |
| 469 | AAGGTGAAGCGGAACTAACCCTGTA | SHANK3 H22A(+1711+1735) 2mm_1_17 | 25 mer |
| 470 | AAGGTGAAGCGGAACTGACCCTATA | SHANK3 H22A(+1711+1735) 2mm_1_23 | 25 mer |
| 471 | AAAGTGAAGCGGAACTGACCCTGTA | SHANK3 H22A(+1711+1735) 2mm_1_3 | 25 mer |
| 472 | AAGATGAAGCGGAACTGACCCTGTA | SHANK3 H22A(+1711+1735) 2mm_1_4 | 25 mer |
| 473 | AAGGTAAAGCGGAACTGACCCTGTA | SHANK3 H22A(+1711+1735) 2mm_1_6 | 25 mer |
| 474 | AAGGTGAAACGGAACTGACCCTGTA | SHANK3 H22A(+1711+1735) 2mm_1_9 | 25 mer |
| 475 | GAGGTGAAGCAAAACTGACCCTGTA | SHANK3 H22A(+1711+1735) 2mm_11_12 | 25 mer |
| 476 | GAGGTGAAGCAGAACTAACCCTGTA | SHANK3 H22A(+1711+1735) 2mm_11_17 | 25 mer |
| 477 | GAGGTGAAGCAGAACTGACCCTATA | SHANK3 H22A(+1711+1735) 2mm_11_23 | 25 mer |
| 478 | GAGGTGAAGCGAAACTAACCCTGTA | SHANK3 H22A(+1711+1735) 2mm_12_17 | 25 mer |
| 479 | GAGGTGAAGCGAAACTGACCCTATA | SHANK3 H22A(+1711+1735) 2mm_12_23 | 25 mer |
| 480 | GAAGTGAAGCAGAACTGACCCTGTA | SHANK3 H22A(+1711+1735) 2mm_3_11 | 25 mer |
| 481 | GAAGTGAAGCGAAACTGACCCTGTA | SHANK3 H22A(+1711+1735) 2mm_3_12 | 25 mer |
| 482 | GAAGTGAAGCGGAACTAACCCTGTA | SHANK3 H22A(+1711+1735) 2mm_3_17 | 25 mer |
| 483 | GAAGTGAAGCGGAACTGACCCTATA | SHANK3 H22A(+1711+1735) 2mm_3_23 | 25 mer |
| 484 | GAAATGAAGCGGAACTGACCCTGTA | SHANK3 H22A(+1711+1735) 2mm_3_4 | 25 mer |
| 485 | GAAGTAAAGCGGAACTGACCCTGTA | SHANK3 H22A(+1711+1735) 2mm_3_6 | 25 mer |
| 486 | GAAGTGAAACGGAACTGACCCTGTA | SHANK3 H22A(+1711+1735) 2mm_3_9 | 25 mer |
| 487 | GAGATGAAGCAGAACTGACCCTGTA | SHANK3 H22A(+1711+1735) 2mm_4_11 | 25 mer |
| 488 | GAGATGAAGCGAAACTGACCCTGTA | SHANK3 H22A(+1711+1735) 2mm_4_12 | 25 mer |
| 489 | GAGATGAAGCGGAACTAACCCTGTA | SHANK3 H22A(+1711+1735) 2mm_4_17 | 25 mer |
| 490 | GAGATGAAGCGGAACTGACCCTATA | SHANK3 H22A(+1711+1735) 2mm_4_23 | 25 mer |
| 491 | GAGATAAAGCGGAACTGACCCTGTA | SHANK3 H22A(+1711+1735) 2mm_4_6 | 25 mer |
| 492 | GAGATGAAACGGAACTGACCCTGTA | SHANK3 H22A(+1711+1735) 2mm_4_9 | 25 mer |
| 493 | GAGGTAAAGCAGAACTGACCCTGTA | SHANK3 H22A(+1711+1735) 2mm_6_11 | 25 mer |
| 494 | GAGGTAAAGCGAAACTGACCCTGTA | SHANK3 H22A(+1711+1735) 2mm_6_12 | 25 mer |
| 495 | GAGGTAAAGCGGAACTAACCCTGTA | SHANK3 H22A(+1711+1735) 2mm_6_17 | 25 mer |
| 496 | GAGGTAAAGCGGAACTGACCCTATA | SHANK3 H22A(+1711+1735) 2mm_6_23 | 25 mer |
| 497 | GAGGTAAAACGGAACTGACCCTGTA | SHANK3 H22A(+1711+1735) 2mm_6_9 | 25 mer |
| 498 | GAGGTGAAACAGAACTGACCCTGTA | SHANK3 H22A(+1711+1735) 2mm_9_11 | 25 mer |
| 499 | GAGGTGAAACGAAACTGACCCTGTA | SHANK3 H22A(+1711+1735) 2mm_9_12 | 25 mer |
| 500 | GAGGTGAAACGGAACTAACCCTGTA | SHANK3 H22A(+1711+1735) 2mm_9_17 | 25 mer |
| 501 | GAGGTGAAACGGAACTGACCCTATA | SHANK3 H22A(+1711+1735) 2mm_9_23 | 25 mer |
| 502 | GAGGTGAAGCGGAACTGACCCTATA | SHANK3 H22A(+1711+1735) mm1 | 25 mer |
| 503 | TGAGGTGAAGCGGAACTGACCCTGT | SHANK3 H22A(+1712+1736) 1mm_1 | 25 mer |
| 504 | GGAGGTGAATCGGAACTGACCCTGT | SHANK3 H22A(+1712+1736) 1mm_10 | 25 mer |
| 505 | GGAGGTGAAGTGGAACTGACCCTGT | SHANK3 H22A(+1712+1736) 1mm_11 | 25 mer |
| 506 | GGAGGTGAAGCTGAACTGACCCTGT | SHANK3 H22A(+1712+1736) 1mm_12 | 25 mer |
| 507 | GGAGGTGAAGCGTAACTGACCCTGT | SHANK3 H22A(+1712+1736) 1mm_13 | 25 mer |
| 508 | GGAGGTGAAGCGGAATTGACCCTGT | SHANK3 H22A(+1712+1736) 1mm_16 | 25 mer |
| 509 | GGAGGTGAAGCGGAACTTACCCTGT | SHANK3 H22A(+1712+1736) 1mm_18 | 25 mer |
| 510 | GTAGGTGAAGCGGAACTGACCCTGT | SHANK3 H22A(+1712+1736) 1mm_2 | 25 mer |
| 511 | GGAGGTGAAGCGGAACTGATCCTGT | SHANK3 H22A(+1712+1736) 1mm_20 | 25 mer |
| 512 | GGAGGTGAAGCGGAACTGACTCTGT | SHANK3 H22A(+1712+1736) 1mm_21 | 25 mer |
| 513 | GGAGGTGAAGCGGAACTGACCTTGT | SHANK3 H22A(+1712+1736) 1mm_22 | 25 mer |
| 514 | GGAGGTGAAGCGGAACTGACCCTTT | SHANK3 H22A(+1712+1736) 1mm_24 | 25 mer |
| 515 | GGATGTGAAGCGGAACTGACCCTGT | SHANK3 H22A(+1712+1736) 1mm_4 | 25 mer |
| 516 | GGAGTTGAAGCGGAACTGACCCTGT | SHANK3 H22A(+1712+1736) 1mm_5 | 25 mer |
| 517 | GGAGGTTAAGCGGAACTGACCCTGT | SHANK3 H22A(+1712+1736) 1mm_7 | 25 mer |
| 518 | AGAGGTGAAACGGAACTGACCCTGT | SHANK3 H22A(+1712+1736) 2mm_1_10 | 25 mer |
| 519 | AGAGGTGAAGCAGAACTGACCCTGT | SHANK3 H22A(+1712+1736) 2mm_1_12 | 25 mer |
| 520 | AGAGGTGAAGCGAAACTGACCCTGT | SHANK3 H22A(+1712+1736) 2mm_1_13 | 25 mer |
| 521 | AGAGGTGAAGCGGAACTAACCCTGT | SHANK3 H22A(+1712+1736) 2mm_1_18 | 25 mer |
| 522 | AAAGGTGAAGCGGAACTGACCCTGT | SHANK3 H22A(+1712+1736) 2mm_1_2 | 25 mer |
| 523 | AGAGGTGAAGCGGAACTGACCCTAT | SHANK3 H22A(+1712+1736) 2mm_1_24 | 25 mer |
| 524 | AGAAGTGAAGCGGAACTGACCCTGT | SHANK3 H22A(+1712+1736) 2mm_1_4 | 25 mer |
| 525 | AGAGATGAAGCGGAACTGACCCTGT | SHANK3 H22A(+1712+1736) 2mm_1_5 | 25 mer |
| 526 | AGAGGTAAAGCGGAACTGACCCTGT | SHANK3 H22A(+1712+1736) 2mm_1_7 | 25 mer |
| 527 | GGAGGTGAAACAGAACTGACCCTGT | SHANK3 H22A(+1712+1736) 2mm_10_12 | 25 mer |
| 528 | GGAGGTGAAACGAAACTGACCCTGT | SHANK3 H22A(+1712+1736) 2mm_10_13 | 25 mer |
| 529 | GGAGGTGAAACGGAACTAACCCTGT | SHANK3 H22A(+1712+1736) 2mm_10_18 | 25 mer |
| 530 | GGAGGTGAAACGGAACTGACCCTAT | SHANK3 H22A(+1712+1736) 2mm_10_24 | 25 mer |
| 531 | GGAGGTGAAGCAAAACTGACCCTGT | SHANK3 H22A(+1712+1736) 2mm_12_13 | 25 mer |
| 532 | GGAGGTGAAGCAGAACTAACCCTGT | SHANK3 H22A(+1712+1736) 2mm_12_18 | 25 mer |
| 533 | GGAGGTGAAGCAGAACTGACCCTAT | SHANK3 H22A(+1712+1736) 2mm_12_24 | 25 mer |
| 534 | GGAGGTGAAGCGAAACTAACCCTGT | SHANK3 H22A(+1712+1736) 2mm_13_18 | 25 mer |
| 535 | GGAGGTGAAGCGAAACTGACCCTAT | SHANK3 H22A(+1712+1736) 2mm_13_24 | 25 mer |
| 536 | GAAGGTGAAACGGAACTGACCCTGT | SHANK3 H22A(+1712+1736) 2mm_2_10 | 25 mer |
| 537 | GAAGGTGAAGCAGAACTGACCCTGT | SHANK3 H22A(+1712+1736) 2mm_2_12 | 25 mer |
| 538 | GAAGGTGAAGCGAAACTGACCCTGT | SHANK3 H22A(+1712+1736) 2mm_2_13 | 25 mer |
| 539 | GAAGGTGAAGCGGAACTAACCCTGT | SHANK3 H22A(+1712+1736) 2mm_2_18 | 25 mer |
| 540 | GAAGGTGAAGCGGAACTGACCCTAT | SHANK3 H22A(+1712+1736) 2mm_2_24 | 25 mer |
| 541 | GAAAGTGAAGCGGAACTGACCCTGT | SHANK3 H22A(+1712+1736) 2mm_2_4 | 25 mer |
| 542 | GAAGATGAAGCGGAACTGACCCTGT | SHANK3 H22A(+1712+1736) 2mm_2_5 | 25 mer |
| 543 | GAAGGTAAAGCGGAACTGACCCTGT | SHANK3 H22A(+1712+1736) 2mm_2_7 | 25 mer |
| 544 | GGAAGTGAAACGGAACTGACCCTGT | SHANK3 H22A(+1712+1736) 2mm_4_10 | 25 mer |
| 545 | GGAAGTGAAGCAGAACTGACCCTGT | SHANK3 H22A(+1712+1736) 2mm_4_12 | 25 mer |
| 546 | GGAAGTGAAGCGAAACTGACCCTGT | SHANK3 H22A(+1712+1736) 2mm_4_13 | 25 mer |
| 547 | GGAAGTGAAGCGGAACTAACCCTGT | SHANK3 H22A(+1712+1736) 2mm_4_18 | 25 mer |
| 548 | GGAAGTGAAGCGGAACTGACCCTAT | SHANK3 H22A(+1712+1736) 2mm_4_24 | 25 mer |
| 549 | GGAAATGAAGCGGAACTGACCCTGT | SHANK3 H22A(+1712+1736) 2mm_4_5 | 25 mer |
| 550 | GGAAGTAAAGCGGAACTGACCCTGT | SHANK3 H22A(+1712+1736) 2mm_4_7 | 25 mer |
| 551 | GGAGATGAAACGGAACTGACCCTGT | SHANK3 H22A(+1712+1736) 2mm_5_10 | 25 mer |
| 552 | GGAGATGAAGCAGAACTGACCCTGT | SHANK3 H22A(+1712+1736) 2mm_5_12 | 25 mer |
| 553 | GGAGATGAAGCGAAACTGACCCTGT | SHANK3 H22A(+1712+1736) 2mm_5_13 | 25 mer |
| 554 | GGAGATGAAGCGGAACTAACCCTGT | SHANK3 H22A(+1712+1736) 2mm_5_18 | 25 mer |
| 555 | GGAGATGAAGCGGAACTGACCCTAT | SHANK3 H22A(+1712+1736) 2mm_5_24 | 25 mer |
| 556 | GGAGATAAAGCGGAACTGACCCTGT | SHANK3 H22A(+1712+1736) 2mm_5_7 | 25 mer |
| 557 | GGAGGTAAAACGGAACTGACCCTGT | SHANK3 H22A(+1712+1736) 2mm_7_10 | 25 mer |
| 558 | GGAGGTAAAGCAGAACTGACCCTGT | SHANK3 H22A(+1712+1736) 2mm_7_12 | 25 mer |
| 559 | GGAGGTAAAGCGAAACTGACCCTGT | SHANK3 H22A(+1712+1736) 2mm_7_13 | 25 mer |
| 560 | GGAGGTAAAGCGGAACTAACCCTGT | SHANK3 H22A(+1712+1736) 2mm_7_18 | 25 mer |
| 561 | GGAGGTAAAGCGGAACTGACCCTAT | SHANK3 H22A(+1712+1736) 2mm_7_24 | 25 mer |
| 562 | GGAGGTGAAGCGGAACTGACCCTAT | SHANK3 H22A(+1712+1736) mm1 | 25 mer |
| 563 | AGGAGGTGAAGCGGAACTGACCCTG | SHANK3 H22A(+1713+1737) | 25 mer |
| 564 | AGGAGGTGAATCGGAACTGACCCTG | SHANK3 H22A(+1713+1737) 1mm_11 | 25 mer |
| 565 | AGGAGGTGAAGTGGAACTGACCCTG | SHANK3 H22A(+1713+1737) 1mm_12 | 25 mer |
| 566 | AGGAGGTGAAGCTGAACTGACCCTG | SHANK3 H22A(+1713+1737) 1mm_13 | 25 mer |
| 567 | AGGAGGTGAAGCGTAACTGACCCTG | SHANK3 H22A(+1713+1737) 1mm_14 | 25 mer |
| 568 | AGGAGGTGAAGCGGAATTGACCCTG | SHANK3 H22A(+1713+1737) 1mm_17 | 25 mer |
| 569 | AGGAGGTGAAGCGGAACTTACCCTG | SHANK3 H22A(+1713+1737) 1mm_19 | 25 mer |
| 570 | ATGAGGTGAAGCGGAACTGACCCTG | SHANK3 H22A(+1713+1737) 1mm_2 | 25 mer |
| 571 | AGGAGGTGAAGCGGAACTGATCCTG | SHANK3 H22A(+1713+1737) 1mm_21 | 25 mer |
| 572 | AGGAGGTGAAGCGGAACTGACTCTG | SHANK3 H22A(+1713+1737) 1mm_22 | 25 mer |
| 573 | AGGAGGTGAAGCGGAACTGACCTTG | SHANK3 H22A(+1713+1737) 1mm_23 | 25 mer |
| 574 | AGTAGGTGAAGCGGAACTGACCCTG | SHANK3 H22A(+1713+1737) 1mm_3 | 25 mer |
| 575 | AGGATGTGAAGCGGAACTGACCCTG | SHANK3 H22A(+1713+1737) 1mm_5 | 25 mer |
| 576 | AGGAGTTGAAGCGGAACTGACCCTG | SHANK3 H22A(+1713+1737) 1mm_6 | 25 mer |
| 577 | AGGAGGTTAAGCGGAACTGACCCTG | SHANK3 H22A(+1713+1737) 1mm_8 | 25 mer |
| 578 | AGGAGGTGAAACAGAACTGACCCTG | SHANK3 H22A(+1713+1737) 2mm_11_13 | 25 mer |
| 579 | AGGAGGTGAAACGAAACTGACCCTG | SHANK3 H22A(+1713+1737) 2mm_11_14 | 25 mer |
| 580 | AGGAGGTGAAACGGAACTAACCCTG | SHANK3 H22A(+1713+1737) 2mm_11_19 | 25 mer |
| 581 | AGGAGGTGAAACGGAACTGACCCTA | SHANK3 H22A(+1713+1737) 2mm_11_25 | 25 mer |
| 582 | AGGAGGTGAAGCAAAACTGACCCTG | SHANK3 H22A(+1713+1737) 2mm_13_14 | 25 mer |
| 583 | AGGAGGTGAAGCAGAACTAACCCTG | SHANK3 H22A(+1713+1737) 2mm_13_19 | 25 mer |
| 584 | AGGAGGTGAAGCAGAACTGACCCTA | SHANK3 H22A(+1713+1737) 2mm_13_25 | 25 mer |
| 585 | AGGAGGTGAAGCGAAACTAACCCTG | SHANK3 H22A(+1713+1737) 2mm_14_19 | 25 mer |
| 586 | AGGAGGTGAAGCGAAACTGACCCTA | SHANK3 H22A(+1713+1737) 2mm_14_25 | 25 mer |
| 587 | AAGAGGTGAAACGGAACTGACCCTG | SHANK3 H22A(+1713+1737) 2mm_2_11 | 25 mer |
| 588 | AAGAGGTGAAGCAGAACTGACCCTG | SHANK3 H22A(+1713+1737) 2mm_2_13 | 25 mer |
| 589 | AAGAGGTGAAGCGAAACTGACCCTG | SHANK3 H22A(+1713+1737) 2mm_2_14 | 25 mer |
| 590 | AAGAGGTGAAGCGGAACTAACCCTG | SHANK3 H22A(+1713+1737) 2mm_2_19 | 25 mer |
| 591 | AAGAGGTGAAGCGGAACTGACCCTA | SHANK3 H22A(+1713+1737) 2mm_2_25 | 25 mer |
| 592 | AAAAGGTGAAGCGGAACTGACCCTG | SHANK3 H22A(+1713+1737) 2mm_2_3 | 25 mer |
| 593 | AAGAAGTGAAGCGGAACTGACCCTG | SHANK3 H22A(+1713+1737) 2mm_2_5 | 25 mer |
| 594 | AAGAGATGAAGCGGAACTGACCCTG | SHANK3 H22A(+1713+1737) 2mm_2_6 | 25 mer |
| 595 | AAGAGGTAAAGCGGAACTGACCCTG | SHANK3 H22A(+1713+1737) 2mm_2_8 | 25 mer |
| 596 | AGAAGGTGAAACGGAACTGACCCTG | SHANK3 H22A(+1713+1737) 2mm_3_11 | 25 mer |
| 597 | AGAAGGTGAAGCAGAACTGACCCTG | SHANK3 H22A(+1713+1737) 2mm_3_13 | 25 mer |
| 598 | AGAAGGTGAAGCGAAACTGACCCTG | SHANK3 H22A(+1713+1737) 2mm_3_14 | 25 mer |
| 599 | AGAAGGTGAAGCGGAACTAACCCTG | SHANK3 H22A(+1713+1737) 2mm_3_19 | 25 mer |
| 600 | AGAAGGTGAAGCGGAACTGACCCTA | SHANK3 H22A(+1713+1737) 2mm_3_25 | 25 mer |
| 601 | AGAAAGTGAAGCGGAACTGACCCTG | SHANK3 H22A(+1713+1737) 2mm_3_5 | 25 mer |
| 602 | AGAAGATGAAGCGGAACTGACCCTG | SHANK3 H22A(+1713+1737) 2mm_3_6 | 25 mer |
| 603 | AGAAGGTAAAGCGGAACTGACCCTG | SHANK3 H22A(+1713+1737) 2mm_3_8 | 25 mer |
| 604 | AGGAAGTGAAACGGAACTGACCCTG | SHANK3 H22A(+1713+1737) 2mm_5_11 | 25 mer |
| 605 | AGGAAGTGAAGCAGAACTGACCCTG | SHANK3 H22A(+1713+1737) 2mm_5_13 | 25 mer |
| 606 | AGGAAGTGAAGCGAAACTGACCCTG | SHANK3 H22A(+1713+1737) 2mm_5_14 | 25 mer |
| 607 | AGGAAGTGAAGCGGAACTAACCCTG | SHANK3 H22A(+1713+1737) 2mm_5_19 | 25 mer |
| 608 | AGGAAGTGAAGCGGAACTGACCCTA | SHANK3 H22A(+1713+1737) 2mm_5_25 | 25 mer |
| 609 | AGGAAATGAAGCGGAACTGACCCTG | SHANK3 H22A(+1713+1737) 2mm_5_6 | 25 mer |
| 610 | AGGAAGTAAAGCGGAACTGACCCTG | SHANK3 H22A(+1713+1737) 2mm_5_8 | 25 mer |
| 611 | AGGAGATGAAACGGAACTGACCCTG | SHANK3 H22A(+1713+1737) 2mm_6_11 | 25 mer |
| 612 | AGGAGATGAAGCAGAACTGACCCTG | SHANK3 H22A(+1713+1737) 2mm_6_13 | 25 mer |
| 613 | AGGAGATGAAGCGAAACTGACCCTG | SHANK3 H22A(+1713+1737) 2mm_6_14 | 25 mer |
| 614 | AGGAGATGAAGCGGAACTAACCCTG | SHANK3 H22A(+1713+1737) 2mm_6_19 | 25 mer |
| 615 | AGGAGATGAAGCGGAACTGACCCTA | SHANK3 H22A(+1713+1737) 2mm_6_25 | 25 mer |
| 616 | AGGAGATAAAGCGGAACTGACCCTG | SHANK3 H22A(+1713+1737) 2mm_6_8 | 25 mer |
| 617 | AGGAGGTAAAACGGAACTGACCCTG | SHANK3 H22A(+1713+1737) 2mm_8_11 | 25 mer |
| 618 | AGGAGGTAAAGCAGAACTGACCCTG | SHANK3 H22A(+1713+1737) 2mm_8_13 | 25 mer |
| 619 | AGGAGGTAAAGCGAAACTGACCCTG | SHANK3 H22A(+1713+1737) 2mm_8_14 | 25 mer |
| 620 | AGGAGGTAAAGCGGAACTAACCCTG | SHANK3 H22A(+1713+1737) 2mm_8_19 | 25 mer |
| 621 | AGGAGGTAAAGCGGAACTGACCCTA | SHANK3 H22A(+1713+1737) 2mm_8_25 | 25 mer |
| 622 | AGGAGGTGAAGCGGAACTGACCCTA | SHANK3 H22A(+1713+1737) mm1 | 25 mer |
| 623 | AAGGAGGTGAATCGGAACTGACCCT | SHANK3 H22A(+1714+1738) 1mm_12 | 25 mer |
| 624 | AAGGAGGTGAAGTGGAACTGACCCT | SHANK3 H22A(+1714+1738) 1mm_13 | 25 mer |
| 625 | AAGGAGGTGAAGCTGAACTGACCCT | SHANK3 H22A(+1714+1738) 1mm_14 | 25 mer |
| 626 | AAGGAGGTGAAGCGTAACTGACCCT | SHANK3 H22A(+1714+1738) 1mm_15 | 25 mer |
| 627 | AAGGAGGTGAAGCGGAATTGACCCT | SHANK3 H22A(+1714+1738) 1mm_18 | 25 mer |
| 628 | AAGGAGGTGAAGCGGAACTTACCCT | SHANK3 H22A(+1714+1738) 1mm_20 | 25 mer |
| 629 | AAGGAGGTGAAGCGGAACTGATCCT | SHANK3 H22A(+1714+1738) 1mm_22 | 25 mer |
| 630 | AAGGAGGTGAAGCGGAACTGACTCT | SHANK3 H22A(+1714+1738) 1mm_23 | 25 mer |
| 631 | AAGGAGGTGAAGCGGAACTGACCTT | SHANK3 H22A(+1714+1738) 1mm_24 | 25 mer |
| 632 | AATGAGGTGAAGCGGAACTGACCCT | SHANK3 H22A(+1714+1738) 1mm_3 | 25 mer |
| 633 | AAGTAGGTGAAGCGGAACTGACCCT | SHANK3 H22A(+1714+1738) 1mm_4 | 25 mer |
| 634 | AAGGATGTGAAGCGGAACTGACCCT | SHANK3 H22A(+1714+1738) 1mm_6 | 25 mer |
| 635 | AAGGAGTTGAAGCGGAACTGACCCT | SHANK3 H22A(+1714+1738) 1mm_7 | 25 mer |
| 636 | AAGGAGGTTAAGCGGAACTGACCCT | SHANK3 H22A(+1714+1738) 1mm_9 | 25 mer |
| 637 | AAGGAGGTGAAGCGGAACTAACCCT | SHANK3 H22A(+1714+1738) mm1 | 25 mer |
| 638 | AAGGAGGTGAAGCGAAACTAACCCT | SHANK3 H22A(+1714+1738) mm2 | 25 mer |
| 639 | AAAGGAGGTGAAGCGGAACTGACCC | SHANK3 H22A(+1715+1739) | 25 mer |
| 640 | AAAGGAGGTTAAGCGGAACTGACCC | SHANK3 H22A(+1715+1739) 1mm_10 | 25 mer |
| 641 | AAAGGAGGTGAATCGGAACTGACCC | SHANK3 H22A(+1715+1739) 1mm_13 | 25 mer |
| 642 | AAAGGAGGTGAAGTGGAACTGACCC | SHANK3 H22A(+1715+1739) 1mm_14 | 25 mer |
| 643 | AAAGGAGGTGAAGCTGAACTGACCC | SHANK3 H22A(+1715+1739) 1mm_15 | 25 mer |
| 644 | AAAGGAGGTGAAGCGTAACTGACCC | SHANK3 H22A(+1715+1739) 1mm_16 | 25 mer |
| 645 | AAAGGAGGTGAAGCGGAATTGACCC | SHANK3 H22A(+1715+1739) 1mm_19 | 25 mer |
| 646 | AAAGGAGGTGAAGCGGAACTTACCC | SHANK3 H22A(+1715+1739) 1mm_21 | 25 mer |
| 647 | AAAGGAGGTGAAGCGGAACTGATCC | SHANK3 H22A(+1715+1739) 1mm_23 | 25 mer |
| 648 | AAAGGAGGTGAAGCGGAACTGACTC | SHANK3 H22A(+1715+1739) 1mm_24 | 25 mer |
| 649 | AAAGGAGGTGAAGCGGAACTGACCT | SHANK3 H22A(+1715+1739) 1mm_25 | 25 mer |
| 650 | AAATGAGGTGAAGCGGAACTGACCC | SHANK3 H22A(+1715+1739) 1mm_4 | 25 mer |
| 651 | AAAGTAGGTGAAGCGGAACTGACCC | SHANK3 H22A(+1715+1739) 1mm_5 | 25 mer |
| 652 | AAAGGATGTGAAGCGGAACTGACCC | SHANK3 H22A(+1715+1739) 1mm_7 | 25 mer |
| 653 | AAAGGAGTTGAAGCGGAACTGACCC | SHANK3 H22A(+1715+1739) 1mm_8 | 25 mer |
| 654 | AAAGGAGGTGAAGCGGAACTAACCC | SHANK3 H22A(+1715+1739) mm1 | 25 mer |
| 655 | AAAGGAGGTGAAGCGAAACTAACCC | SHANK3 H22A(+1715+1739) mm2 | 25 mer |
| 656 | AAAAGGAGGTGAAGCGGAACTGACC | SHANK3 H22A(+1716+1740) | 25 mer |
| 657 | AAAAGGAGGTTAAGCGGAACTGACC | SHANK3 H22A(+1716+1740) 1mm_11 | 25 mer |
| 658 | AAAAGGAGGTGAATCGGAACTGACC | SHANK3 H22A(+1716+1740) 1mm_14 | 25 mer |
| 659 | AAAAGGAGGTGAAGTGGAACTGACC | SHANK3 H22A(+1716+1740) 1mm_15 | 25 mer |
| 660 | AAAAGGAGGTGAAGCTGAACTGACC | SHANK3 H22A(+1716+1740) 1mm_16 | 25 mer |
| 661 | AAAAGGAGGTGAAGCGTAACTGACC | SHANK3 H22A(+1716+1740) 1mm_17 | 25 mer |
| 662 | AAAAGGAGGTGAAGCGGAATTGACC | SHANK3 H22A(+1716+1740) 1mm_20 | 25 mer |
| 663 | AAAAGGAGGTGAAGCGGAACTTACC | SHANK3 H22A(+1716+1740) 1mm_22 | 25 mer |
| 664 | AAAAGGAGGTGAAGCGGAACTGATC | SHANK3 H22A(+1716+1740) 1mm_24 | 25 mer |
| 665 | AAAAGGAGGTGAAGCGGAACTGACT | SHANK3 H22A(+1716+1740) 1mm_25 | 25 mer |
| 666 | AAAATGAGGTGAAGCGGAACTGACC | SHANK3 H22A(+1716+1740) 1mm_5 | 25 mer |
| 667 | AAAAGTAGGTGAAGCGGAACTGACC | SHANK3 H22A(+1716+1740) 1mm_6 | 25 mer |
| 668 | AAAAGGATGTGAAGCGGAACTGACC | SHANK3 H22A(+1716+1740) 1mm_8 | 25 mer |
| 669 | AAAAGGAGTTGAAGCGGAACTGACC | SHANK3 H22A(+1716+1740) 1mm_9 | 25 mer |
| 670 | AAAAGGAGGTGAAGCGGAACTAACC | SHANK3 H22A(+1716+1740) mm1 | 25 mer |
| 671 | AAAAGGAGGTGAAGCGAAACTAACC | SHANK3 H22A(+1716+1740) mm2 | 25 mer |
| 672 | TAAAAGGAGGTGAAGCGGAACTGAC | SHANK3 H22A(+1717+1741) 1mm_1 | 25 mer |
| 673 | CAAAAGGAGTTGAAGCGGAACTGAC | SHANK3 H22A(+1717+1741) 1mm_10 | 25 mer |
| 674 | CAAAAGGAGGTTAAGCGGAACTGAC | SHANK3 H22A(+1717+1741) 1mm_12 | 25 mer |
| 675 | CAAAAGGAGGTGAATCGGAACTGAC | SHANK3 H22A(+1717+1741) 1mm_15 | 25 mer |
| 676 | CAAAAGGAGGTGAAGTGGAACTGAC | SHANK3 H22A(+1717+1741) 1mm_16 | 25 mer |
| 677 | CAAAAGGAGGTGAAGCTGAACTGAC | SHANK3 H22A(+1717+1741) 1mm_17 | 25 mer |
| 678 | CAAAAGGAGGTGAAGCGTAACTGAC | SHANK3 H22A(+1717+1741) 1mm_18 | 25 mer |
| 679 | CAAAAGGAGGTGAAGCGGAATTGAC | SHANK3 H22A(+1717+1741) 1mm_21 | 25 mer |
| 680 | CAAAAGGAGGTGAAGCGGAACTTAC | SHANK3 H22A(+1717+1741) 1mm_23 | 25 mer |
| 681 | CAAAAGGAGGTGAAGCGGAACTGAT | SHANK3 H22A(+1717+1741) 1mm_25 | 25 mer |
| 682 | CAAAATGAGGTGAAGCGGAACTGAC | SHANK3 H22A(+1717+1741) 1mm_6 | 25 mer |
| 683 | CAAAAGTAGGTGAAGCGGAACTGAC | SHANK3 H22A(+1717+1741) 1mm_7 | 25 mer |
| 684 | CAAAAGGATGTGAAGCGGAACTGAC | SHANK3 H22A(+1717+1741) 1mm_9 | 25 mer |
| 685 | CAAAAGGAGGTGAAGCGGAACTAAC | SHANK3 H22A(+1717+1741) mm1 | 25 mer |
| 686 | CAAAAGGAGGTGAAGCGAAACTAAC | SHANK3 H22A(+1717+1741) mm2 | 25 mer |
| 687 | ACAAAAGGAGGTGAAGCGGAACTGA | SHANK3 H22A(+1718+1742) | 25 mer |
| 688 | ACAAAAGGATGTGAAGCGGAACTGA | SHANK3 H22A(+1718+1742) 1mm_10 | 25 mer |
| 689 | ACAAAAGGAGTTGAAGCGGAACTGA | SHANK3 H22A(+1718+1742) 1mm_11 | 25 mer |
| 690 | ACAAAAGGAGGTTAAGCGGAACTGA | SHANK3 H22A(+1718+1742) 1mm_13 | 25 mer |
| 691 | ACAAAAGGAGGTGAATCGGAACTGA | SHANK3 H22A(+1718+1742) 1mm_16 | 25 mer |
| 692 | ACAAAAGGAGGTGAAGTGGAACTGA | SHANK3 H22A(+1718+1742) 1mm_17 | 25 mer |
| 693 | ACAAAAGGAGGTGAAGCTGAACTGA | SHANK3 H22A(+1718+1742) 1mm_18 | 25 mer |
| 694 | ACAAAAGGAGGTGAAGCGTAACTGA | SHANK3 H22A(+1718+1742) 1mm_19 | 25 mer |
| 695 | ATAAAAGGAGGTGAAGCGGAACTGA | SHANK3 H22A(+1718+1742) 1mm_2 | 25 mer |
| 696 | ACAAAAGGAGGTGAAGCGGAATTGA | SHANK3 H22A(+1718+1742) 1mm_22 | 25 mer |
| 697 | ACAAAAGGAGGTGAAGCGGAACTTA | SHANK3 H22A(+1718+1742) 1mm_24 | 25 mer |
| 698 | ACAAAATGAGGTGAAGCGGAACTGA | SHANK3 H22A(+1718+1742) 1mm_7 | 25 mer |
| 699 | ACAAAAGTAGGTGAAGCGGAACTGA | SHANK3 H22A(+1718+1742) 1mm_8 | 25 mer |
| 700 | ACAAAAGGAGGTGAAGCGGAACTAA | SHANK3 H22A(+1718+1742) mm1 | 25 mer |
| 701 | ACAAAAGGAGGTGAAGCGAAACTAA | SHANK3 H22A(+1718+1742) mm2 | 25 mer |
| 702 | TACAAAAGGAGGTGAAGCGGAACTG | SHANK3 H22A(+1719+1743) | 25 mer |
| 703 | TACAAAAGGATGTGAAGCGGAACTG | SHANK3 H22A(+1719+1743) 1mm_11 | 25 mer |
| 704 | TACAAAAGGAGTTGAAGCGGAACTG | SHANK3 H22A(+1719+1743) 1mm_12 | 25 mer |
| 705 | TACAAAAGGAGGTTAAGCGGAACTG | SHANK3 H22A(+1719+1743) 1mm_14 | 25 mer |
| 706 | TACAAAAGGAGGTGAATCGGAACTG | SHANK3 H22A(+1719+1743) 1mm_17 | 25 mer |
| 707 | TACAAAAGGAGGTGAAGTGGAACTG | SHANK3 H22A(+1719+1743) 1mm_18 | 25 mer |
| 708 | TACAAAAGGAGGTGAAGCTGAACTG | SHANK3 H22A(+1719+1743) 1mm_19 | 25 mer |
| 709 | TACAAAAGGAGGTGAAGCGTAACTG | SHANK3 H22A(+1719+1743) 1mm_20 | 25 mer |
| 710 | TACAAAAGGAGGTGAAGCGGAATTG | SHANK3 H22A(+1719+1743) 1mm_23 | 25 mer |
| 711 | TATAAAAGGAGGTGAAGCGGAACTG | SHANK3 H22A(+1719+1743) 1mm_3 | 25 mer |
| 712 | TACAAAATGAGGTGAAGCGGAACTG | SHANK3 H22A(+1719+1743) 1mm_8 | 25 mer |
| 713 | TACAAAAGTAGGTGAAGCGGAACTG | SHANK3 H22A(+1719+1743) 1mm_9 | 25 mer |
| 714 | TACAAAAGGAGGTGAAGCGGAACTA | SHANK3 H22A(+1719+1743) mm1 | 25 mer |
| 715 | TACAAAAGGAGGTGAAGCGAAACTA | SHANK3 H22A(+1719+1743) mm2 | 25 mer |
| 716 | ATACAAAAGTAGGTGAAGCGGAACT | SHANK3 H22A(+1720+1744) 1mm_10 | 25 mer |
| 717 | ATACAAAAGGATGTGAAGCGGAACT | SHANK3 H22A(+1720+1744) 1mm_12 | 25 mer |
| 718 | ATACAAAAGGAGTTGAAGCGGAACT | SHANK3 H22A(+1720+1744) 1mm_13 | 25 mer |
| 719 | ATACAAAAGGAGGTTAAGCGGAACT | SHANK3 H22A(+1720+1744) 1mm_15 | 25 mer |
| 720 | ATACAAAAGGAGGTGAATCGGAACT | SHANK3 H22A(+1720+1744) 1mm_18 | 25 mer |
| 721 | ATACAAAAGGAGGTGAAGTGGAACT | SHANK3 H22A(+1720+1744) 1mm_19 | 25 mer |
| 722 | ATACAAAAGGAGGTGAAGCTGAACT | SHANK3 H22A(+1720+1744) 1mm_20 | 25 mer |
| 723 | ATACAAAAGGAGGTGAAGCGTAACT | SHANK3 H22A(+1720+1744) 1mm_21 | 25 mer |
| 724 | ATACAAAAGGAGGTGAAGCGGAATT | SHANK3 H22A(+1720+1744) 1mm_24 | 25 mer |
| 725 | ATATAAAAGGAGGTGAAGCGGAACT | SHANK3 H22A(+1720+1744) 1mm_4 | 25 mer |
| 726 | ATACAAAATGAGGTGAAGCGGAACT | SHANK3 H22A(+1720+1744) 1mm_9 | 25 mer |
| 727 | ATACAAAAGGAGGTGAAACGAAACT | SHANK3 H22A(+1720+1744) 2mm_18_21 | 25 mer |
| 728 | ATACAAAAGGAGGTGAAGCGAAACT | SHANK3 H22A(+1720+1744) mm1 | 25 mer |
| 729 | ATACAAAAGGAGGTGAAGCAAAACT | SHANK3 H22A(+1720+1744) mm2 | 25 mer |
| 730 | TAAAAACCCAAATTTAAC | SHANK3 H22A(+1689+1706) 1mm_15 | 18 mer |
| 731 | TAAAAACCCAAATTGAAT | SHANK3 H22A(+1689+1706) 1mm_18 | 18 mer |
| 732 | TAAAAATCCAAATTGAAC | SHANK3 H22A(+1689+1706) 1mm_7 | 18 mer |
| 733 | TAAAAACTCAAATTGAAC | SHANK3 H22A(+1689+1706) 1mm_8 | 18 mer |
| 734 | TAAAAACCTAAATTGAAC | SHANK3 H22A(+1689+1706) 1mm_9 | 18 mer |
| 735 | TTAAAAACCTAAATTGAA | SHANK3 H22A(+1690+1707) 1mm_10 | 18 mer |
| 736 | TTAAAAACCCAAATTTAA | SHANK3 H22A(+1690+1707) 1mm_16 | 18 mer |
| 737 | TTAAAAATCCAAATTGAA | SHANK3 H22A(+1690+1707) 1mm_8 | 18 mer |
| 738 | TTAAAAACTCAAATTGAA | SHANK3 H22A(+1690+1707) 1mm_9 | 18 mer |
| 739 | TTTAAAAACCCAAATTGA | SHANK3 H22A(+1691+1708) 1mm_1 | 18 mer |
| 740 | GTTAAAAACTCAAATTGA | SHANK3 H22A(+1691+1708) 1mm_10 | 18 mer |
| 741 | GTTAAAAACCTAAATTGA | SHANK3 H22A(+1691+1708) 1mm_11 | 18 mer |
| 742 | GTTAAAAACCCAAATTTA | SHANK3 H22A(+1691+1708) 1mm_17 | 18 mer |
| 743 | GTTAAAAATCCAAATTGA | SHANK3 H22A(+1691+1708) 1mm_9 | 18 mer |
| 744 | AGTTAAAAATCCAAATTG | SHANK3 H22A(+1692+1709) 1mm_10 | 18 mer |
| 745 | AGTTAAAAACTCAAATTG | SHANK3 H22A(+1692+1709) 1mm_11 | 18 mer |
| 746 | AGTTAAAAACCTAAATTG | SHANK3 H22A(+1692+1709) 1mm_12 | 18 mer |
| 747 | AGTTAAAAACCCAAATTT | SHANK3 H22A(+1692+1709) 1mm_18 | 18 mer |
| 748 | ATTTAAAAACCCAAATTG | SHANK3 H22A(+1692+1709) 1mm_2 | 18 mer |
| 749 | AAGTTAAAAATCCAAATT | SHANK3 H22A(+1693+1710) 1mm_11 | 18 mer |
| 750 | AAGTTAAAAACTCAAATT | SHANK3 H22A(+1693+1710) 1mm_12 | 18 mer |
| 751 | AAGTTAAAAACCTAAATT | SHANK3 H22A(+1693+1710) 1mm_13 | 18 mer |
| 752 | AATTTAAAAACCCAAATT | SHANK3 H22A(+1693+1710) 1mm_3 | 18 mer |
| 753 | AAAGTTAAAAATCCAAAT | SHANK3 H22A(+1694+1711) 1mm_12 | 18 mer |
| 754 | AAAGTTAAAAACTCAAAT | SHANK3 H22A(+1694+1711) 1mm_13 | 18 mer |
| 755 | AAAGTTAAAAACCTAAAT | SHANK3 H22A(+1694+1711) 1mm_14 | 18 mer |
| 756 | AAATTTAAAAACCCAAAT | SHANK3 H22A(+1694+1711) 1mm_4 | 18 mer |
| 757 | TAAAGTTAAAAATCCAAA | SHANK3 H22A(+1695+1712) 1mm_13 | 18 mer |
| 758 | TAAAGTTAAAAACTCAAA | SHANK3 H22A(+1695+1712) 1mm_14 | 18 mer |
| 759 | TAAAGTTAAAAACCTAAA | SHANK3 H22A(+1695+1712) 1mm_15 | 18 mer |
| 760 | TAAATTTAAAAACCCAAA | SHANK3 H22A(+1695+1712) 1mm_5 | 18 mer |
| 761 | TTAAAGTTAAAAACCCAA | SHANK3 H22A(+1696+1713) 1mm_1 | 18 mer |
| 762 | GTAAAGTTAAAAATCCAA | SHANK3 H22A(+1696+1713) 1mm_14 | 18 mer |
| 763 | GTAAAGTTAAAAACTCAA | SHANK3 H22A(+1696+1713) 1mm_15 | 18 mer |
| 764 | GTAAAGTTAAAAACCTAA | SHANK3 H22A(+1696+1713) 1mm_16 | 18 mer |
| 765 | GTAAATTTAAAAACCCAA | SHANK3 H22A(+1696+1713) 1mm_6 | 18 mer |
| 766 | TGTAAAGTTAAAAATCCA | SHANK3 H22A(+1697+1714) 1mm_15 | 18 mer |
| 767 | TGTAAAGTTAAAAACTCA | SHANK3 H22A(+1697+1714) 1mm_16 | 18 mer |
| 768 | TGTAAAGTTAAAAACCTA | SHANK3 H22A(+1697+1714) 1mm_17 | 18 mer |
| 769 | TTTAAAGTTAAAAACCCA | SHANK3 H22A(+1697+1714) 1mm_2 | 18 mer |
| 770 | TGTAAATTTAAAAACCCA | SHANK3 H22A(+1697+1714) 1mm_7 | 18 mer |
| 771 | TTGTAAAGTTAAAAACCC | SHANK3 H22A(+1698+1715) 1mm_1 | 18 mer |
| 772 | CTGTAAAGTTAAAAATCC | SHANK3 H22A(+1698+1715) 1mm_16 | 18 mer |
| 773 | CTGTAAAGTTAAAAACTC | SHANK3 H22A(+1698+1715) 1mm_17 | 18 mer |
| 774 | CTGTAAAGTTAAAAACCT | SHANK3 H22A(+1698+1715) 1mm_18 | 18 mer |
| 775 | CTTTAAAGTTAAAAACCC | SHANK3 H22A(+1698+1715) 1mm_3 | 18 mer |
| 776 | CTGTAAATTTAAAAACCC | SHANK3 H22A(+1698+1715) 1mm_8 | 18 mer |
| 777 | TCTGTAAAGTTAAAAACC | SHANK3 H22A(+1699+1716) 1mm_1 | 18 mer |
| 778 | CCTGTAAAGTTAAAAATC | SHANK3 H22A(+1699+1716) 1mm_17 | 18 mer |
| 779 | CCTGTAAAGTTAAAAACT | SHANK3 H22A(+1699+1716) 1mm_18 | 18 mer |
| 780 | CTTGTAAAGTTAAAAACC | SHANK3 H22A(+1699+1716) 1mm_2 | 18 mer |
| 781 | CCTTTAAAGTTAAAAACC | SHANK3 H22A(+1699+1716) 1mm_4 | 18 mer |
| 782 | CCTGTAAATTTAAAAACC | SHANK3 H22A(+1699+1716) 1mm_9 | 18 mer |
| 783 | TCCTGTAAAGTTAAAAAC | SHANK3 H22A(+1700+1717) 1mm_1 | 18 mer |
| 784 | CCCTGTAAATTTAAAAAC | SHANK3 H22A(+1700+1717) 1mm_10 | 18 mer |
| 785 | CCCTGTAAAGTTAAAAAT | SHANK3 H22A(+1700+1717) 1mm_18 | 18 mer |
| 786 | CTCTGTAAAGTTAAAAAC | SHANK3 H22A(+1700+1717) 1mm_2 | 18 mer |
| 787 | CCTTGTAAAGTTAAAAAC | SHANK3 H22A(+1700+1717) 1mm_3 | 18 mer |
| 788 | CCCTTTAAAGTTAAAAAC | SHANK3 H22A(+1700+1717) 1mm_5 | 18 mer |
| 789 | ACCCTGTAAATTTAAAAA | SHANK3 H22A(+1701+1718) 1mm_11 | 18 mer |
| 790 | ATCCTGTAAAGTTAAAAA | SHANK3 H22A(+1701+1718) 1mm_2 | 18 mer |
| 791 | ACTCTGTAAAGTTAAAAA | SHANK3 H22A(+1701+1718) 1mm_3 | 18 mer |
| 792 | ACCTTGTAAAGTTAAAAA | SHANK3 H22A(+1701+1718) 1mm_4 | 18 mer |
| 793 | ACCCTTTAAAGTTAAAAA | SHANK3 H22A(+1701+1718) 1mm_6 | 18 mer |
| 794 | TACCCTGTAAAGTTAAAA | SHANK3 H22A(+1702+1719) 1mm_1 | 18 mer |
| 795 | GACCCTGTAAATTTAAAA | SHANK3 H22A(+1702+1719) 1mm_12 | 18 mer |
| 796 | GATCCTGTAAAGTTAAAA | SHANK3 H22A(+1702+1719) 1mm_3 | 18 mer |
| 797 | GACTCTGTAAAGTTAAAA | SHANK3 H22A(+1702+1719) 1mm_4 | 18 mer |
| 798 | GACCTTGTAAAGTTAAAA | SHANK3 H22A(+1702+1719) 1mm_5 | 18 mer |
| 799 | GACCCTTTAAAGTTAAAA | SHANK3 H22A(+1702+1719) 1mm_7 | 18 mer |
| 800 | TGACCCTGTAAAGTTAAA | SHANK3 H22A(+1703+1720) | 18 mer |
| 801 | TGACCCTGTAAATTTAAA | SHANK3 H22A(+1703+1720) 1mm_13 | 18 mer |
| 802 | TTACCCTGTAAAGTTAAA | SHANK3 H22A(+1703+1720) 1mm_2 | 18 mer |
| 803 | TGATCCTGTAAAGTTAAA | SHANK3 H22A(+1703+1720) 1mm_4 | 18 mer |
| 804 | TGACTCTGTAAAGTTAAA | SHANK3 H22A(+1703+1720) 1mm_5 | 18 mer |
| 805 | TGACCTTGTAAAGTTAAA | SHANK3 H22A(+1703+1720) 1mm_6 | 18 mer |
| 806 | TGACCCTTTAAAGTTAAA | SHANK3 H22A(+1703+1720) 1mm_8 | 18 mer |
| 807 | TGACCCTGTAAAATTAAA | SHANK3 H22A(+1703+1720) mm1 | 18 mer |
| 808 | CTGACCCTGTAAAGTTAA | SHANK3 H22A(+1704+1721) | 18 mer |
| 809 | TTGACCCTGTAAAGTTAA | SHANK3 H22A(+1704+1721) 1mm_1 | 18 mer |
| 810 | CTGACCCTGTAAATTTAA | SHANK3 H22A(+1704+1721) 1mm_14 | 18 mer |
| 811 | CTTACCCTGTAAAGTTAA | SHANK3 H22A(+1704+1721) 1mm_3 | 18 mer |
| 812 | CTGATCCTGTAAAGTTAA | SHANK3 H22A(+1704+1721) 1mm_5 | 18 mer |
| 813 | CTGACTCTGTAAAGTTAA | SHANK3 H22A(+1704+1721) 1mm_6 | 18 mer |
| 814 | CTGACCTTGTAAAGTTAA | SHANK3 H22A(+1704+1721) 1mm_7 | 18 mer |
| 815 | CTGACCCTTTAAAGTTAA | SHANK3 H22A(+1704+1721) 1mm_9 | 18 mer |
| 816 | CTGACCCTGTAAAATTAA | SHANK3 H22A(+1704+1721) mm1 | 18 mer |
| 817 | ACTGACCCTGTAAAGTTA | SHANK3 H22A(+1705+1722) | 18 mer |
| 818 | ACTGACCCTTTAAAGTTA | SHANK3 H22A(+1705+1722) 1mm_10 | 18 mer |
| 819 | ACTGACCCTGTAAATTTA | SHANK3 H22A(+1705+1722) 1mm_15 | 18 mer |
| 820 | ATTGACCCTGTAAAGTTA | SHANK3 H22A(+1705+1722) 1mm_2 | 18 mer |
| 821 | ACTTACCCTGTAAAGTTA | SHANK3 H22A(+1705+1722) 1mm_4 | 18 mer |
| 822 | ACTGATCCTGTAAAGTTA | SHANK3 H22A(+1705+1722) 1mm_6 | 18 mer |
| 823 | ACTGACTCTGTAAAGTTA | SHANK3 H22A(+1705+1722) 1mm_7 | 18 mer |
| 824 | ACTGACCTTGTAAAGTTA | SHANK3 H22A(+1705+1722) 1mm_8 | 18 mer |
| 825 | ACTGACCCTGTAAAATTA | SHANK3 H22A(+1705+1722) mm1 | 18 mer |
| 826 | AACTGACCCTGTAAAGTT | SHANK3 H22A(+1706+1723) | 18 mer |
| 827 | AACTGACCCTTTAAAGTT | SHANK3 H22A(+1706+1723) 1mm_11 | 18 mer |
| 828 | AACTGACCCTGTAAATTT | SHANK3 H22A(+1706+1723) 1mm_16 | 18 mer |
| 829 | AATTGACCCTGTAAAGTT | SHANK3 H22A(+1706+1723) 1mm_3 | 18 mer |
| 830 | AACTTACCCTGTAAAGTT | SHANK3 H22A(+1706+1723) 1mm_5 | 18 mer |
| 831 | AACTGATCCTGTAAAGTT | SHANK3 H22A(+1706+1723) 1mm_7 | 18 mer |
| 832 | AACTGACTCTGTAAAGTT | SHANK3 H22A(+1706+1723) 1mm_8 | 18 mer |
| 833 | AACTGACCTTGTAAAGTT | SHANK3 H22A(+1706+1723) 1mm_9 | 18 mer |
| 834 | AACTGACCCTGTAAAATT | SHANK3 H22A(+1706+1723) mm1 | 18 mer |
| 835 | GAACTGACCCTGTAAAGT | SHANK3 H22A(+1707+1724) | 18 mer |
| 836 | TAACTGACCCTGTAAAGT | SHANK3 H22A(+1707+1724) 1mm_1 | 18 mer |
| 837 | GAACTGACCTTGTAAAGT | SHANK3 H22A(+1707+1724) 1mm_10 | 18 mer |
| 838 | GAACTGACCCTTTAAAGT | SHANK3 H22A(+1707+1724) 1mm_12 | 18 mer |
| 839 | GAACTGACCCTGTAAATT | SHANK3 H22A(+1707+1724) 1mm_17 | 18 mer |
| 840 | GAATTGACCCTGTAAAGT | SHANK3 H22A(+1707+1724) 1mm_4 | 18 mer |
| 841 | GAACTTACCCTGTAAAGT | SHANK3 H22A(+1707+1724) 1mm_6 | 18 mer |
| 842 | GAACTGATCCTGTAAAGT | SHANK3 H22A(+1707+1724) 1mm_8 | 18 mer |
| 843 | GAACTGACTCTGTAAAGT | SHANK3 H22A(+1707+1724) 1mm_9 | 18 mer |
| 844 | GAACTGACCCTGTAAAAT | SHANK3 H22A(+1707+1724) mm1 | 18 mer |
| 845 | GGAACTGACCCTGTAAAG | SHANK3 H22A(+1708+1725) | 18 mer |
| 846 | TGAACTGACCCTGTAAAG | SHANK3 H22A(+1708+1725) 1mm_1 | 18 mer |
| 847 | GGAACTGACTCTGTAAAG | SHANK3 H22A(+1708+1725) 1mm_10 | 18 mer |
| 848 | GGAACTGACCTTGTAAAG | SHANK3 H22A(+1708+1725) 1mm_11 | 18 mer |
| 849 | GGAACTGACCCTTTAAAG | SHANK3 H22A(+1708+1725) 1mm_13 | 18 mer |
| 850 | GGAACTGACCCTGTAAAT | SHANK3 H22A(+1708+1725) 1mm_18 | 18 mer |
| 851 | GTAACTGACCCTGTAAAG | SHANK3 H22A(+1708+1725) 1mm_2 | 18 mer |
| 852 | GGAATTGACCCTGTAAAG | SHANK3 H22A(+1708+1725) 1mm_5 | 18 mer |
| 853 | GGAACTTACCCTGTAAAG | SHANK3 H22A(+1708+1725) 1mm_7 | 18 mer |
| 854 | GGAACTGATCCTGTAAAG | SHANK3 H22A(+1708+1725) 1mm_9 | 18 mer |
| 855 | GGAACTGACCCTGTAAAA | SHANK3 H22A(+1708+1725) mm1 | 18 mer |
| 856 | CGGAACTGACCCTGTAAA | SHANK3 H22A(+1709+1726) | 18 mer |
| 857 | TGGAACTGACCCTGTAAA | SHANK3 H22A(+1709+1726) 1mm_1 | 18 mer |
| 858 | CGGAACTGATCCTGTAAA | SHANK3 H22A(+1709+1726) 1mm_10 | 18 mer |
| 859 | CGGAACTGACTCTGTAAA | SHANK3 H22A(+1709+1726) 1mm_11 | 18 mer |
| 860 | CGGAACTGACCTTGTAAA | SHANK3 H22A(+1709+1726) 1mm_12 | 18 mer |
| 861 | CGGAACTGACCCTTTAAA | SHANK3 H22A(+1709+1726) 1mm_14 | 18 mer |
| 862 | CTGAACTGACCCTGTAAA | SHANK3 H22A(+1709+1726) 1mm_2 | 18 mer |
| 863 | CGTAACTGACCCTGTAAA | SHANK3 H22A(+1709+1726) 1mm_3 | 18 mer |
| 864 | CGGAATTGACCCTGTAAA | SHANK3 H22A(+1709+1726) 1mm_6 | 18 mer |
| 865 | CGGAACTTACCCTGTAAA | SHANK3 H22A(+1709+1726) 1mm_8 | 18 mer |
| 866 | CGGAACTGACCCTATAAA | SHANK3 H22A(+1709+1726) mm1 | 18 mer |
| 867 | GCGGAACTGACCCTGTAA | SHANK3 H22A(+1710+1727) | 18 mer |
| 868 | TCGGAACTGACCCTGTAA | SHANK3 H22A(+1710+1727) 1mm_1 | 18 mer |
| 869 | GCGGAACTGATCCTGTAA | SHANK3 H22A(+1710+1727) 1mm_11 | 18 mer |
| 870 | GCGGAACTGACTCTGTAA | SHANK3 H22A(+1710+1727) 1mm_12 | 18 mer |
| 871 | GCGGAACTGACCTTGTAA | SHANK3 H22A(+1710+1727) 1mm_13 | 18 mer |
| 872 | GCGGAACTGACCCTTTAA | SHANK3 H22A(+1710+1727) 1mm_15 | 18 mer |
| 873 | GTGGAACTGACCCTGTAA | SHANK3 H22A(+1710+1727) 1mm_2 | 18 mer |
| 874 | GCTGAACTGACCCTGTAA | SHANK3 H22A(+1710+1727) 1mm_3 | 18 mer |
| 875 | GCGTAACTGACCCTGTAA | SHANK3 H22A(+1710+1727) 1mm_4 | 18 mer |
| 876 | GCGGAATTGACCCTGTAA | SHANK3 H22A(+1710+1727) 1mm_7 | 18 mer |
| 877 | GCGGAACTTACCCTGTAA | SHANK3 H22A(+1710+1727) 1mm_9 | 18 mer |
| 878 | GCGGAACTGACCCTATAA | SHANK3 H22A(+1710+1727) mm1 | 18 mer |
| 879 | AGCGGAACTGACCCTGTA | SHANK3 H22A(+1711+1728) | 18 mer |
| 880 | AGCGGAACTTACCCTGTA | SHANK3 H22A(+1711+1728) 1mm_10 | 18 mer |
| 881 | AGCGGAACTGATCCTGTA | SHANK3 H22A(+1711+1728) 1mm_12 | 18 mer |
| 882 | AGCGGAACTGACTCTGTA | SHANK3 H22A(+1711+1728) 1mm_13 | 18 mer |
| 883 | AGCGGAACTGACCTTGTA | SHANK3 H22A(+1711+1728) 1mm_14 | 18 mer |
| 884 | AGCGGAACTGACCCTTTA | SHANK3 H22A(+1711+1728) 1mm_16 | 18 mer |
| 885 | ATCGGAACTGACCCTGTA | SHANK3 H22A(+1711+1728) 1mm_2 | 18 mer |
| 886 | AGTGGAACTGACCCTGTA | SHANK3 H22A(+1711+1728) 1mm_3 | 18 mer |
| 887 | AGCTGAACTGACCCTGTA | SHANK3 H22A(+1711+1728) 1mm_4 | 18 mer |
| 888 | AGCGTAACTGACCCTGTA | SHANK3 H22A(+1711+1728) 1mm_5 | 18 mer |
| 889 | AGCGGAATTGACCCTGTA | SHANK3 H22A(+1711+1728) 1mm_8 | 18 mer |
| 890 | AGCGGAACTGACCCTATA | SHANK3 H22A(+1711+1728) mm1 | 18 mer |
| 891 | AAGCGGAACTGACCCTGT | SHANK3 H22A(+1712+1729) | 18 mer |
| 892 | AAGCGGAACTTACCCTGT | SHANK3 H22A(+1712+1729) 1mm_11 | 18 mer |
| 893 | AAGCGGAACTGATCCTGT | SHANK3 H22A(+1712+1729) 1mm_13 | 18 mer |
| 894 | AAGCGGAACTGACTCTGT | SHANK3 H22A(+1712+1729) 1mm_14 | 18 mer |
| 895 | AAGCGGAACTGACCTTGT | SHANK3 H22A(+1712+1729) 1mm_15 | 18 mer |
| 896 | AAGCGGAACTGACCCTTT | SHANK3 H22A(+1712+1729) 1mm_17 | 18 mer |
| 897 | AATCGGAACTGACCCTGT | SHANK3 H22A(+1712+1729) 1mm_3 | 18 mer |
| 898 | AAGTGGAACTGACCCTGT | SHANK3 H22A(+1712+1729) 1mm_4 | 18 mer |
| 899 | AAGCTGAACTGACCCTGT | SHANK3 H22A(+1712+1729) 1mm_5 | 18 mer |
| 900 | AAGCGTAACTGACCCTGT | SHANK3 H22A(+1712+1729) 1mm_6 | 18 mer |
| 901 | AAGCGGAATTGACCCTGT | SHANK3 H22A(+1712+1729) 1mm_9 | 18 mer |
| 902 | AAGCGGAACTGACCCTAT | SHANK3 H22A(+1712+1729) mm1 | 18 mer |
| 903 | GAAGCGGAACTGACCCTG | SHANK3 H22A(+1713+1730) | 18 mer |
| 904 | TAAGCGGAACTGACCCTG | SHANK3 H22A(+1713+1730) 1mm_1 | 18 mer |
| 905 | GAAGCGGAATTGACCCTG | SHANK3 H22A(+1713+1730) 1mm_10 | 18 mer |
| 906 | GAAGCGGAACTTACCCTG | SHANK3 H22A(+1713+1730) 1mm_12 | 18 mer |
| 907 | GAAGCGGAACTGATCCTG | SHANK3 H22A(+1713+1730) 1mm_14 | 18 mer |
| 908 | GAAGCGGAACTGACTCTG | SHANK3 H22A(+1713+1730) 1mm_15 | 18 mer |
| 909 | GAAGCGGAACTGACCTTG | SHANK3 H22A(+1713+1730) 1mm_16 | 18 mer |
| 910 | GAAGCGGAACTGACCCTT | SHANK3 H22A(+1713+1730) 1mm_18 | 18 mer |
| 911 | GAATCGGAACTGACCCTG | SHANK3 H22A(+1713+1730) 1mm_4 | 18 mer |
| 912 | GAAGTGGAACTGACCCTG | SHANK3 H22A(+1713+1730) 1mm_5 | 18 mer |
| 913 | GAAGCTGAACTGACCCTG | SHANK3 H22A(+1713+1730) 1mm_6 | 18 mer |
| 914 | GAAGCGTAACTGACCCTG | SHANK3 H22A(+1713+1730) 1mm_7 | 18 mer |
| 915 | GAAGCGGAACTGACCCTA | SHANK3 H22A(+1713+1730) mm1 | 18 mer |
| 916 | TGAAGCGGAACTGACCCT | SHANK3 H22A(+1714+1731) | 18 mer |
| 917 | TGAAGCGGAATTGACCCT | SHANK3 H22A(+1714+1731) 1mm_11 | 18 mer |
| 918 | TGAAGCGGAACTTACCCT | SHANK3 H22A(+1714+1731) 1mm_13 | 18 mer |
| 919 | TGAAGCGGAACTGATCCT | SHANK3 H22A(+1714+1731) 1mm_15 | 18 mer |
| 920 | TGAAGCGGAACTGACTCT | SHANK3 H22A(+1714+1731) 1mm_16 | 18 mer |
| 921 | TGAAGCGGAACTGACCTT | SHANK3 H22A(+1714+1731) 1mm_17 | 18 mer |
| 922 | TTAAGCGGAACTGACCCT | SHANK3 H22A(+1714+1731) 1mm_2 | 18 mer |
| 923 | TGAATCGGAACTGACCCT | SHANK3 H22A(+1714+1731) 1mm_5 | 18 mer |
| 924 | TGAAGTGGAACTGACCCT | SHANK3 H22A(+1714+1731) 1mm_6 | 18 mer |
| 925 | TGAAGCTGAACTGACCCT | SHANK3 H22A(+1714+1731) 1mm_7 | 18 mer |
| 926 | TGAAGCGTAACTGACCCT | SHANK3 H22A(+1714+1731) 1mm_8 | 18 mer |
| 927 | TGAAGCGGAACTAACCCT | SHANK3 H22A(+1714+1731) mm1 | 18 mer |
| 928 | GTGAAGCGGAACTGACCC | SHANK3 H22A(+1715+1732) | 18 mer |
| 929 | TTGAAGCGGAACTGACCC | SHANK3 H22A(+1715+1732) 1mm_1 | 18 mer |
| 930 | GTGAAGCGGAATTGACCC | SHANK3 H22A(+1715+1732) 1mm_12 | 18 mer |
| 931 | GTGAAGCGGAACTTACCC | SHANK3 H22A(+1715+1732) 1mm_14 | 18 mer |
| 932 | GTGAAGCGGAACTGATCC | SHANK3 H22A(+1715+1732) 1mm_16 | 18 mer |
| 933 | GTGAAGCGGAACTGACTC | SHANK3 H22A(+1715+1732) 1mm_17 | 18 mer |
| 934 | GTGAAGCGGAACTGACCT | SHANK3 H22A(+1715+1732) 1mm_18 | 18 mer |
| 935 | GTTAAGCGGAACTGACCC | SHANK3 H22A(+1715+1732) 1mm_3 | 18 mer |
| 936 | GTGAATCGGAACTGACCC | SHANK3 H22A(+1715+1732) 1mm_6 | 18 mer |
| 937 | GTGAAGTGGAACTGACCC | SHANK3 H22A(+1715+1732) 1mm_7 | 18 mer |
| 938 | GTGAAGCTGAACTGACCC | SHANK3 H22A(+1715+1732) 1mm_8 | 18 mer |
| 939 | GTGAAGCGTAACTGACCC | SHANK3 H22A(+1715+1732) 1mm_9 | 18 mer |
| 940 | GTGAAGCGGAACTAACCC | SHANK3 H22A(+1715+1732) mm1 | 18 mer |
| 941 | GGTGAAGCGGAACTGACC | SHANK3 H22A(+1716+1733) | 18 mer |
| 942 | TGTGAAGCGGAACTGACC | SHANK3 H22A(+1716+1733) 1mm_1 | 18 mer |
| 943 | GGTGAAGCGTAACTGACC | SHANK3 H22A(+1716+1733) 1mm_10 | 18 mer |
| 944 | GGTGAAGCGGAATTGACC | SHANK3 H22A(+1716+1733) 1mm_13 | 18 mer |
| 945 | GGTGAAGCGGAACTTACC | SHANK3 H22A(+1716+1733) 1mm_15 | 18 mer |
| 946 | GGTGAAGCGGAACTGATC | SHANK3 H22A(+1716+1733) 1mm_17 | 18 mer |
| 947 | GGTGAAGCGGAACTGACT | SHANK3 H22A(+1716+1733) 1mm_18 | 18 mer |
| 948 | GTTGAAGCGGAACTGACC | SHANK3 H22A(+1716+1733) 1mm_2 | 18 mer |
| 949 | GGTTAAGCGGAACTGACC | SHANK3 H22A(+1716+1733) 1mm_4 | 18 mer |
| 950 | GGTGAATCGGAACTGACC | SHANK3 H22A(+1716+1733) 1mm_7 | 18 mer |
| 951 | GGTGAAGTGGAACTGACC | SHANK3 H22A(+1716+1733) 1mm_8 | 18 mer |
| 952 | GGTGAAGCTGAACTGACC | SHANK3 H22A(+1716+1733) 1mm_9 | 18 mer |
| 953 | GGTGAAGCGGAACTAACC | SHANK3 H22A(+1716+1733) mm1 | 18 mer |
| 954 | AGGTGAAGCGGAACTGAC | SHANK3 H22A(+1717+1734) | 18 mer |
| 955 | AGGTGAAGCTGAACTGAC | SHANK3 H22A(+1717+1734) 1mm_10 | 18 mer |
| 956 | AGGTGAAGCGTAACTGAC | SHANK3 H22A(+1717+1734) 1mm_11 | 18 mer |
| 957 | AGGTGAAGCGGAATTGAC | SHANK3 H22A(+1717+1734) 1mm_14 | 18 mer |
| 958 | AGGTGAAGCGGAACTTAC | SHANK3 H22A(+1717+1734) 1mm_16 | 18 mer |
| 959 | AGGTGAAGCGGAACTGAT | SHANK3 H22A(+1717+1734) 1mm_18 | 18 mer |
| 960 | ATGTGAAGCGGAACTGAC | SHANK3 H22A(+1717+1734) 1mm_2 | 18 mer |
| 961 | AGTTGAAGCGGAACTGAC | SHANK3 H22A(+1717+1734) 1mm_3 | 18 mer |
| 962 | AGGTTAAGCGGAACTGAC | SHANK3 H22A(+1717+1734) 1mm_5 | 18 mer |
| 963 | AGGTGAATCGGAACTGAC | SHANK3 H22A(+1717+1734) 1mm_8 | 18 mer |
| 964 | AGGTGAAGTGGAACTGAC | SHANK3 H22A(+1717+1734) 1mm_9 | 18 mer |
| 965 | AGGTGAAGCGGAACTAAC | SHANK3 H22A(+1717+1734) mm1 | 18 mer |
| 966 | GAGGTGAAGCGGAACTGA | SHANK3 H22A(+1718+1735) | 18 mer |
| 967 | TAGGTGAAGCGGAACTGA | SHANK3 H22A(+1718+1735) 1mm_1 | 18 mer |
| 968 | GAGGTGAAGTGGAACTGA | SHANK3 H22A(+1718+1735) 1mm_10 | 18 mer |
| 969 | GAGGTGAAGCTGAACTGA | SHANK3 H22A(+1718+1735) 1mm_11 | 18 mer |
| 970 | GAGGTGAAGCGTAACTGA | SHANK3 H22A(+1718+1735) 1mm_12 | 18 mer |
| 971 | GAGGTGAAGCGGAATTGA | SHANK3 H22A(+1718+1735) 1mm_15 | 18 mer |
| 972 | GAGGTGAAGCGGAACTTA | SHANK3 H22A(+1718+1735) 1mm_17 | 18 mer |
| 973 | GATGTGAAGCGGAACTGA | SHANK3 H22A(+1718+1735) 1mm_3 | 18 mer |
| 974 | GAGTTGAAGCGGAACTGA | SHANK3 H22A(+1718+1735) 1mm_4 | 18 mer |
| 975 | GAGGTTAAGCGGAACTGA | SHANK3 H22A(+1718+1735) 1mm_6 | 18 mer |
| 976 | GAGGTGAATCGGAACTGA | SHANK3 H22A(+1718+1735) 1mm_9 | 18 mer |
| 977 | GAGGTGAAGCGGAACTAA | SHANK3 H22A(+1718+1735) mm1 | 18 mer |
| 978 | GGAGGTGAAGCGGAACTG | SHANK3 H22A(+1719+1736) | 18 mer |
| 979 | TGAGGTGAAGCGGAACTG | SHANK3 H22A(+1719+1736) 1mm_1 | 18 mer |
| 980 | GGAGGTGAATCGGAACTG | SHANK3 H22A(+1719+1736) 1mm_10 | 18 mer |
| 981 | GGAGGTGAAGTGGAACTG | SHANK3 H22A(+1719+1736) 1mm_11 | 18 mer |
| 982 | GGAGGTGAAGCTGAACTG | SHANK3 H22A(+1719+1736) 1mm_12 | 18 mer |
| 983 | GGAGGTGAAGCGTAACTG | SHANK3 H22A(+1719+1736) 1mm_13 | 18 mer |
| 984 | GGAGGTGAAGCGGAATTG | SHANK3 H22A(+1719+1736) 1mm_16 | 18 mer |
| 985 | GGAGGTGAAGCGGAACTT | SHANK3 H22A(+1719+1736) 1mm_18 | 18 mer |
| 986 | GTAGGTGAAGCGGAACTG | SHANK3 H22A(+1719+1736) 1mm_2 | 18 mer |
| 987 | GGATGTGAAGCGGAACTG | SHANK3 H22A(+1719+1736) 1mm_4 | 18 mer |
| 988 | GGAGTTGAAGCGGAACTG | SHANK3 H22A(+1719+1736) 1mm_5 | 18 mer |
| 989 | GGAGGTTAAGCGGAACTG | SHANK3 H22A(+1719+1736) 1mm_7 | 18 mer |
| 990 | GGAGGTGAAGCGGAACTA | SHANK3 H22A(+1719+1736) mm1 | 18 mer |
| 991 | AGGAGGTGAAGCGGAACT | SHANK3 H22A(+1720+1737) | 18 mer |
| 992 | AGGAGGTGAATCGGAACT | SHANK3 H22A(+1720+1737) 1mm_11 | 18 mer |
| 993 | AGGAGGTGAAGTGGAACT | SHANK3 H22A(+1720+1737) 1mm_12 | 18 mer |
| 994 | AGGAGGTGAAGCTGAACT | SHANK3 H22A(+1720+1737) 1mm_13 | 18 mer |
| 995 | AGGAGGTGAAGCGTAACT | SHANK3 H22A(+1720+1737) 1mm_14 | 18 mer |
| 996 | AGGAGGTGAAGCGGAATT | SHANK3 H22A(+1720+1737) 1mm_17 | 18 mer |
| 997 | ATGAGGTGAAGCGGAACT | SHANK3 H22A(+1720+1737) 1mm_2 | 18 mer |
| 998 | AGTAGGTGAAGCGGAACT | SHANK3 H22A(+1720+1737) 1mm_3 | 18 mer |
| 999 | AGGATGTGAAGCGGAACT | SHANK3 H22A(+1720+1737) 1mm_5 | 18 mer |
| 1000 | AGGAGTTGAAGCGGAACT | SHANK3 H22A(+1720+1737) 1mm_6 | 18 mer |
| 1001 | AGGAGGTTAAGCGGAACT | SHANK3 H22A(+1720+1737) 1mm_8 | 18 mer |
| 1002 | AGGAGGTGAAGCGAAACT | SHANK3 H22A(+1720+1737) mm1 | 18 mer |
| 1003 | AAGGAGGTGAAGCGGAAC | SHANK3 H22A(+1721+1738) | 18 mer |
| 1004 | AAGGAGGTGAATCGGAAC | SHANK3 H22A(+1721+1738) 1mm_12 | 18 mer |
| 1005 | AAGGAGGTGAAGTGGAAC | SHANK3 H22A(+1721+1738) 1mm_13 | 18 mer |
| 1006 | AAGGAGGTGAAGCTGAAC | SHANK3 H22A(+1721+1738) 1mm_14 | 18 mer |
| 1007 | AAGGAGGTGAAGCGTAAC | SHANK3 H22A(+1721+1738) 1mm_15 | 18 mer |
| 1008 | AAGGAGGTGAAGCGGAAT | SHANK3 H22A(+1721+1738) 1mm_18 | 18 mer |
| 1009 | AATGAGGTGAAGCGGAAC | SHANK3 H22A(+1721+1738) 1mm_3 | 18 mer |
| 1010 | AAGTAGGTGAAGCGGAAC | SHANK3 H22A(+1721+1738) 1mm_4 | 18 mer |
| 1011 | AAGGATGTGAAGCGGAAC | SHANK3 H22A(+1721+1738) 1mm_6 | 18 mer |
| 1012 | AAGGAGTTGAAGCGGAAC | SHANK3 H22A(+1721+1738) 1mm_7 | 18 mer |
| 1013 | AAGGAGGTTAAGCGGAAC | SHANK3 H22A(+1721+1738) 1mm_9 | 18 mer |
| 1014 | AAGGAGGTGAAGCGAAAC | SHANK3 H22A(+1721+1738) mm1 | 18 mer |
| 1015 | AAAGGAGGTGAAGCGGAA | SHANK3 H22A(+1722+1739) | 18 mer |
| 1016 | AAAGGAGGTTAAGCGGAA | SHANK3 H22A(+1722+1739) 1mm_10 | 18 mer |
| 1017 | AAAGGAGGTGAATCGGAA | SHANK3 H22A(+1722+1739) 1mm_13 | 18 mer |
| 1018 | AAAGGAGGTGAAGTGGAA | SHANK3 H22A(+1722+1739) 1mm_14 | 18 mer |
| 1019 | AAAGGAGGTGAAGCTGAA | SHANK3 H22A(+1722+1739) 1mm_15 | 18 mer |
| 1020 | AAAGGAGGTGAAGCGTAA | SHANK3 H22A(+1722+1739) 1mm_16 | 18 mer |
| 1021 | AAATGAGGTGAAGCGGAA | SHANK3 H22A(+1722+1739) 1mm_4 | 18 mer |
| 1022 | AAAGTAGGTGAAGCGGAA | SHANK3 H22A(+1722+1739) 1mm_5 | 18 mer |
| 1023 | AAAGGATGTGAAGCGGAA | SHANK3 H22A(+1722+1739) 1mm_7 | 18 mer |
| 1024 | AAAGGAGTTGAAGCGGAA | SHANK3 H22A(+1722+1739) 1mm_8 | 18 mer |
| 1025 | AAAGGAGGTGAAGCGAAA | SHANK3 H22A(+1722+1739) mm1 | 18 mer |
| 1026 | AAAAGGAGGTGAAGCGGA | SHANK3 H22A(+1723+1740) | 18 mer |
| 1027 | AAAAGGAGGTTAAGCGGA | SHANK3 H22A(+1723+1740) 1mm_11 | 18 mer |
| 1028 | AAAAGGAGGTGAATCGGA | SHANK3 H22A(+1723+1740) 1mm_14 | 18 mer |
| 1029 | AAAAGGAGGTGAAGTGGA | SHANK3 H22A(+1723+1740) 1mm_15 | 18 mer |
| 1030 | AAAAGGAGGTGAAGCTGA | SHANK3 H22A(+1723+1740) 1mm_16 | 18 mer |
| 1031 | AAAAGGAGGTGAAGCGTA | SHANK3 H22A(+1723+1740) 1mm_17 | 18 mer |
| 1032 | AAAATGAGGTGAAGCGGA | SHANK3 H22A(+1723+1740) 1mm_5 | 18 mer |
| 1033 | AAAAGTAGGTGAAGCGGA | SHANK3 H22A(+1723+1740) 1mm_6 | 18 mer |
| 1034 | AAAAGGATGTGAAGCGGA | SHANK3 H22A(+1723+1740) 1mm_8 | 18 mer |
| 1035 | AAAAGGAGTTGAAGCGGA | SHANK3 H22A(+1723+1740) 1mm_9 | 18 mer |
| 1036 | AAAAGGAGGTGAAGCGAA | SHANK3 H22A(+1723+1740) mm1 | 18 mer |
| 1037 | CAAAAGGAGGTGAAGCGG | SHANK3 H22A(+1724+1741) | 18 mer |
| 1038 | TAAAAGGAGGTGAAGCGG | SHANK3 H22A(+1724+1741) 1mm_1 | 18 mer |
| 1039 | CAAAAGGAGTTGAAGCGG | SHANK3 H22A(+1724+1741) 1mm_10 | 18 mer |
| 1040 | CAAAAGGAGGTTAAGCGG | SHANK3 H22A(+1724+1741) 1mm_12 | 18 mer |
| 1041 | CAAAAGGAGGTGAATCGG | SHANK3 H22A(+1724+1741) 1mm_15 | 18 mer |
| 1042 | CAAAAGGAGGTGAAGTGG | SHANK3 H22A(+1724+1741) 1mm_16 | 18 mer |
| 1043 | CAAAAGGAGGTGAAGCTG | SHANK3 H22A(+1724+1741) 1mm_17 | 18 mer |
| 1044 | CAAAAGGAGGTGAAGCGT | SHANK3 H22A(+1724+1741) 1mm_18 | 18 mer |
| 1045 | CAAAATGAGGTGAAGCGG | SHANK3 H22A(+1724+1741) 1mm_6 | 18 mer |
| 1046 | CAAAAGTAGGTGAAGCGG | SHANK3 H22A(+1724+1741) 1mm_7 | 18 mer |
| 1047 | CAAAAGGATGTGAAGCGG | SHANK3 H22A(+1724+1741) 1mm_9 | 18 mer |
| 1048 | CAAAAGGAGGTGAAGCGA | SHANK3 H22A(+1724+1741) mm1 | 18 mer |
| 1049 | ACAAAAGGAGGTGAAGCG | SHANK3 H22A(+1725+1742) | 18 mer |
| 1050 | ACAAAAGGATGTGAAGCG | SHANK3 H22A(+1725+1742) 1mm_10 | 18 mer |
| 1051 | ACAAAAGGAGTTGAAGCG | SHANK3 H22A(+1725+1742) 1mm_11 | 18 mer |
| 1052 | ACAAAAGGAGGTTAAGCG | SHANK3 H22A(+1725+1742) 1mm_13 | 18 mer |
| 1053 | ACAAAAGGAGGTGAATCG | SHANK3 H22A(+1725+1742) 1mm_16 | 18 mer |
| 1054 | ACAAAAGGAGGTGAAGTG | SHANK3 H22A(+1725+1742) 1mm_17 | 18 mer |
| 1055 | ACAAAAGGAGGTGAAGCT | SHANK3 H22A(+1725+1742) 1mm_18 | 18 mer |
| 1056 | ATAAAAGGAGGTGAAGCG | SHANK3 H22A(+1725+1742) 1mm_2 | 18 mer |
| 1057 | ACAAAATGAGGTGAAGCG | SHANK3 H22A(+1725+1742) 1mm_7 | 18 mer |
| 1058 | ACAAAAGTAGGTGAAGCG | SHANK3 H22A(+1725+1742) 1mm_8 | 18 mer |
| 1059 | ACAAAAGGAGGTGAAGCA | SHANK3 H22A(+1725+1742) mm1 | 18 mer |
| 1060 | TACAAAAGGAGGTGAAGC | SHANK3 H22A(+1726+1743) | 18 mer |
| 1061 | TACAAAAGGATGTGAAGC | SHANK3 H22A(+1726+1743) 1mm_11 | 18 mer |
| 1062 | TACAAAAGGAGTTGAAGC | SHANK3 H22A(+1726+1743) 1mm_12 | 18 mer |
| 1063 | TACAAAAGGAGGTTAAGC | SHANK3 H22A(+1726+1743) 1mm_14 | 18 mer |
| 1064 | TACAAAAGGAGGTGAATC | SHANK3 H22A(+1726+1743) 1mm_17 | 18 mer |
| 1065 | TACAAAAGGAGGTGAAGT | SHANK3 H22A(+1726+1743) 1mm_18 | 18 mer |
| 1066 | TATAAAAGGAGGTGAAGC | SHANK3 H22A(+1726+1743) 1mm_3 | 18 mer |
| 1067 | TACAAAATGAGGTGAAGC | SHANK3 H22A(+1726+1743) 1mm_8 | 18 mer |
| 1068 | TACAAAAGTAGGTGAAGC | SHANK3 H22A(+1726+1743) 1mm_9 | 18 mer |
| 1069 | TACAAAAGGAGGTGAAAC | SHANK3 H22A(+1726+1743) mm1 | 18 mer |
| 1070 | ATACAAAAGGAGGTGAAG | SHANK3 H22A(+1727+1744) | 18 mer |
| 1071 | ATACAAAAGTAGGTGAAG | SHANK3 H22A(+1727+1744) 1mm_10 | 18 mer |
| 1072 | ATACAAAAGGATGTGAAG | SHANK3 H22A(+1727+1744) 1mm_12 | 18 mer |
| 1073 | ATACAAAAGGAGTTGAAG | SHANK3 H22A(+1727+1744) 1mm_13 | 18 mer |
| 1074 | ATACAAAAGGAGGTTAAG | SHANK3 H22A(+1727+1744) 1mm_15 | 18 mer |
| 1075 | ATACAAAAGGAGGTGAAT | SHANK3 H22A(+1727+1744) 1mm_18 | 18 mer |
| 1076 | ATATAAAAGGAGGTGAAG | SHANK3 H22A(+1727+1744) 1mm_4 | 18 mer |
| 1077 | ATACAAAATGAGGTGAAG | SHANK3 H22A(+1727+1744) 1mm_9 | 18 mer |
| 1078 | ATACAAAAGGAGGTGAAA | SHANK3 H22A(+1727+1744) mm1 | 18 mer |

TABLE 2
Exemplary length-matured ASOs targeting a region
(SEQ ID NO: 1079) of the 3′ UTR of SHANK3

| SEQ ID | | | ASO |
|---|---|---|---|
| NO. | ASO Sequence | ASO Name | length |
| 1080 | ACTGACCCTGTAAAGTTAAA | SHANK3_H22A(+1703+1722) | 20 mer |
| 1081 | GAACTGACCCTGTAAAGTTA | SHANK3_H22A(+1705+1724) | 20 mer |
| 1082 | CGGAACTGACCCTGTAAAGT | SHANK3_H22A(+1707+1726) | 20 mer |
| 1083 | ACTGACCCTGTAAAGT | SHANK3_H22A(+1707+1722) | 16 mer |
| 1084 | AACTGACCCTGTAAA | SHANK3_H22A(+1709+1723) | 15 mer |
| 1085 | ACCCTGTAAAGTTAAAAA | SHANK3_H22A(+1701+1718) | 18 mer |
| 1086 | TGACCCTGTAAAGTTAAAAA | SHANK3_H22A(+1701+1720) | 20 mer |
| 1087 | AGCGGAACTGACCCTGTAAA | SHANK3_H22A(+1709+1728) | 20 mer |
| 1088 | AAGCGGAACTGACCCTGTAA | SHANK3_H22A(+1710+1729) | 20 mer |
| 1089 | CATACAAAAGGAGGTGAA | SHANK3_H22A(+1728+1745) | 18 mer |
| 1090 | TCCATACAAAAGGAGGTGAA | SHANK3_H22A(+1728+1747) | 20 mer |
| 1091 | ATGGAACTCCATACAAAA | SHANK3_H22A(+1737+1754) | 18 mer |
| 1092 | AATTGAACGGAACCAAAA | SHANK3_H22A(+1679+1696) | 18 mer |
| 1093 | TAAAGTTAAAAACCCAAA | SHANK3_H22A(+1695+1712) | 18 mer |
| 1094 | GCGGAACTGACCCTGTA | SHANK3_H22A(+1711+1727) | 17 mer |
| 1095 | CGGAACTGACCCTGTAAAGTTAAAA | SHANK3_H22A(+1702+1726) | 25 mer |

TABLE 3
Exemplary chemistry-matured ASOs a region
(SEQ ID NO: 1079) of the 3′ UTR of SHANK3

| SEQ | | | |
|---|---|---|---|
| ID | | | ASO |
| NO. | ASO Sequence | ASO Name | length |
| 1096 | AACT*GACC*CTGT*AAA | SHANK3_H22A(+1709+1723)_31na_4_8_12 | 15 mer |
| 1097 | AACT*GAC*CCTGT*AAA | SHANK3_H22A(+1709+1723)_31na_4_7_12 | 15 mer |
| 1098 | AACT*GACCCTGT*AAA | SHANK3_H22A(+1709+1723)_21na_4_12 | 15 mer |
| 1099 | AACTGAC*CCTGT*AAA | SHANK3_H22A(+1709+1723)_21na_7_12 | 15 mer |
| 1100 | AACTGA*CCCTGT*AAA | SHANK3_H22A(+1709+1723)_21na_6_12 | 15 mer |
| 1101 | A*ACTGACCCT*GTAAA | SHANK3_H22A(+1709+1723)_21na_1_10 | 15 mer |
| 1102 | AACTGA*CCCTGTAAA* | SHANK3_H22A(+1709+1723)_21na_6_15 | 15 mer |
| 1103 | A*ACTGACC*CTGTAAA* | SHANK3_H22A(+1709+1723)_31na_1_8_15 | 15 mer |
| 1104 | AGCG*SA*ACTGACCCTGTAAA | SHANK3_H22A(+1709+1728)_1spr_5_21na_4_6 | 20 mer |
| 1105 | AGCG*SA*ACTGACSCTGTAAA | SHANK3_H22A(+1709+1728)_2spr_5_13_21na_4_6 | 20 mer |
| 1106 | AGCGGAACT*SA*CCCTGTAAA | SHANK3_H22A(+1709+1728)_1spr_10_21na_9_11 | 20 mer |
| 1107 | AGC*GGAACTGACCCTGT*AAA | SHANK3_H22A(+1709+1728)_21na_3_17 | 20 mer |
| 1108 | AGCG*SAACTGACCCTGT*AAA | SHANK3_H22A(+1709+1728)_1spr_5_21na_4_17 | 20 mer |
| 1109 | GCG*SA*ACTGACCCTGTA | SHANK3_H22A(+1711+1727)_1spr_4_21na_3_5 | 17 mer |
| 1110 | GCGGAACT*SA*CCCTGTA | SHANK3_H22A(+1711+1727)_1spr_9_2lna_8_10 | 17 mer |
| 1111 | GCGGA*ACTGA*CCCT*GTA | SHANK3_H22A(+1711+1727)_31na_5_10_14 | 17 mer |
| 1112 | GC*GGAACTGACCCTGT*A | SHANK3_H22A(+1711+1727)_21na_2_16 | 17 mer |
| 1113 | GC*SGAACTGACCCTGT*A | SHANK3_H22A(+1711+1727)_1spr_3_2lna_2_16 | 17 mer |
| 1114 | ATG*SA*ACTCCATACAAAA | SHANK3_H22A(+1737+1754)_1spr_4_21na_3_5 | 18 mer |
| 1115 | ATG*SA*ACTCCATASAAAA | SHANK3_H22A(+1737+1754)_2spr_4_14_21na_3_5 | 18 mer |
| 1116 | ATG*SA*ACTCSATACAAAA | SHANK3_H22A(+1737+1754)_2spr_4_10_21na_3_5 | 18 mer |
| 1117 | ATGGAACTC*SA*TACAAAA | SHANK3_H22A(+1737+1754)_1spr_10_21na_9_11 | 18 mer |
| 1118 | ATGGAACTCCATA*SA*AAA | SHANK3_H22A(+1737+1754)_1spr_14_21na_13_15 | 18 mer |
| 1119 | AT*GGAACTCCATACAA*AA | SHANK3_H22A(+1737+1754)_21na_2_16 | 18 mer |
| 1120 | ATG*GAACTCCATACAA*AA | SHANK3_H22A(+1737+1754)_21na_3_16 | 18 mer |
| 1121 | TAAAGTTAAAAAC*SC*AAA | SHANK3_H22A(+1695+1712)_1spr_14_21na_13_15 | 18 mer |
| 1122 | TAA*SG*TTAAAAACCCAAA | SHANK3_H22A(+1695+1712)_1spr_4_21na_3_5 | 18 mer |
| 1123 | TAA*SG*TTAAAAACSCAAA | SHANK3_H22A(+1695+1712)_2spr_4_14_21na_3_5 | 18 mer |
| 1124 | TAAAGTTAA*SA*ACCCAAA | SHANK3_H22A(+1695+1712)_1spr_10_21na_9_11 | 18 mer |
| 1125 | TAA*AGTT*AAAAACCCA*AA | SHANK3_H22A(+1695+1712)_31na_3_7_16 | 18 mer |
| 1126 | AATTGAA*SG*GAACCAAAA | SHANK3_H22A(+1679+1696)_1spr_8_21na_7_9 | 18 mer |
| 1127 | AATTGAACG*SA*ACCAAAA | SHANK3_H22A(+1679+1696)_1spr_10_2lna_9_11 | 18 mer |
| 1128 | AATTGAACGGAA*SC*AAAA | SHANK3_H22A(+1679+1696)_1spr_13_21na_12_14 | 18 mer |
| 1129 | AATTG*SA*CGGAACCAAAA | SHANK3_H22A(+1679+1696)_1spr_6_21na_5_7 | 18 mer |
| 1130 | AATTSAACG*SA*ACCAAAA | SHANK3_H22A(+1679+1696)_2spr_5_10_21na_9_11 | 18 mer |
| 1131 | AATTG*SA*CGGAASCAAAA | SHANK3_H22A(+1679+1696)_2spr_6 13_2lna_5_7 | 18 mer |
| 1132 | AA*TTGAACGGA*ACCAAAA | SHANK3_H22A(+1679+1696)_21na_2_11 | 18 mer |
| 1133 | AA*TTGAACGSA*ACCAAAA | SHANK3_H22A(+1679+1696)_1spr_10_2lna_2_11 | 18 mer |

(Note:
LNA modified nucleotides are denoted by a ″*″ and abasic spacers with an ″S″.)

1-64. (canceled)

65. An antisense oligonucleotide (ASO), wherein the nucleotide sequence of the antisense oligonucleotide consists of SEQ ID NO:1092, and wherein each nucleotide of the ASO comprises a 2′-O-methoxyethyl moiety.

66. A pharmaceutical composition comprising the ASO according to claim 65 and a pharmaceutically acceptable carrier.

67. A method for treating a condition associated with SHANK3 haploinsufficiency, the method comprising administering to a subject in need thereof a therapeutically effective amount of the ASO according to claim 65.

68. The method according to claim 67, wherein the condition is Phelan-McDermid syndrome, an autism spectrum disorder, schizophrenia, or an intellectual disability.

69. The method according to claim 67, wherein the condition is Phelan-McDermid syndrome.

70. A method for treating a condition associated with SHANK3 haploinsufficiency, the method comprising administering to a subject in need thereof a therapeutically effective amount of the pharmaceutical composition according to claim 66.

71. The method according to claim 70, wherein the condition is Phelan-McDermid syndrome, an autism spectrum disorder, schizophrenia, or an intellectual disability.

72. The method according to claim 70, wherein the condition is Phelan-McDermid syndrome.

The application's sequence listing, which the Patent Office published only in electronic form, follows.

SEQUENCE LISTING (18751 sequences)

SEQ ID NO: 1 - DNA, 1900 bp, synthetic construct
  source 1..1900: mol_type = other DNA
cgccccacccccactcccgccccggccgtgccctgccggcagggccccccacccccaccccgggccgcgggctcggcctgccccttacgacggcgcccgggccaggaatgttgcatgaatcgtcctgtttgctgttgctcggagactcgccctgtacattgcttagtgccctcaccggccgcccagcccacccagcgcacagtcaggaagggcgtggaccagggaggctggggcgggaggtgccgggggtggggtgccctagcgtgaccacctccttcgcagctcctggtggccattctcccagagggggaacctagtccagcatgcgaggtcaggacccgccttggtgactcggggggaggggggagacattgggattctcgatgggggccaaggagcccccctgttttgcatattttaatccactctatatttggaacgagaaaaggaacaaatatctctgtccgtaatagtttcctctcccctcccttctacttccactggtcccactgcagctgcccagtcttccatctccggcccctcactgccactgccaccccacaacggggcaggggacgctccagctggtctggggttggccagggccctagtggcccgccctggggccccagctcggcccctcgcctcgctgagctctagtgtgccccaccgacccttcaggtgctgctcgtggtgggaggggcggcaggccgcgggtcctgctgtgcacccgcgggaccagccggcctgggagaccatcggccgggggggatgagggcagggccctgccgctccaccgcagccatcttcctcacagggtctctccccaaggagggggctagcttggtccccatgctcttgggcaactacagcagagaagcctccctgccttggaccccaaagtctcctgtcctgccctttatgtgtgtgggtgaaactgggtgcgtctgagcacgtgggagccgtgtgtgtgcctgattactgagtggccaccaggggccgctctggactagcgcggggccgtggaggcgtgcaccgtgtgcatgcgtggggtgtacctgtgagagcaccctgtctcctcttccaaagaaagtcagaggccatcctgcaccctgggtccagctgtttgcccagcctgtccttccagagcctcacccagcctgagcggggttccctggtgaatccctgctgcttggggaggccccaagggccccttggaggcagcgcccccaccttgggcttctgagggcatcatagggggacccctagagtcagttcaccacaggccctggggagagtcaaagacccccgagggtgcccagccccccacactgtgactcctcacactcagcgatgacctgtggggtggggggccctgggacgtttttaaacctagggtttggagtctggactaagctccatccacgtcactcacaagtttctgtttatatttctagctttttttaataaaataaaaaaaaaaagaaaacagaagttttcacaacccaggggcctggcacgccggtctgtgcctgcccgccccgccctggcccaccggccccactccctgggcacagagtcacacccactcatccttccgccaacagtccaggtcacacagcagcagtcactgtaacagactgccacatacacactcggtctcacactcacctgtgggttttggttccgttcaatttgggtttttaactttacagggtcagttccgcttcacctccttttgtatggagttccatccggggggtttcaccccctgctccagtcctgaggcctcctgaccctgacgttgtgatacgccccacagagatctatgtttcttatattattattattgataataattattataatattattatgtaataaatttataagaaatgaa

SEQ ID NO: 2 - protein, 22 aa, synthetic construct
RRSRTARAGRPGRNSSRPSAPR

SEQ ID NO: 3 - DNA, 25 bp, synthetic construct
  source 1..25: mol_type = other DNA
gtaaagttaaaaacccaaattgaac

SEQ ID NO: 4 - DNA, 25 bp, synthetic construct
  source 1..25: mol_type = other DNA
ttaaagttaaaaacccaaattgaac

SEQ ID NO: 5 - DNA, 25 bp, synthetic construct
  source 1..25: mol_type = other DNA
gtaaagttaaaaatccaaattgaac

SEQ ID NO: 6 - DNA, 25 bp, synthetic construct
  source 1..25: mol_type = other DNA
gtaaagttaaaaactcaaattgaac

SEQ ID NO: 7 - DNA, 25 bp, synthetic construct
  source 1..25: mol_type = other DNA
gtaaagttaaaaacctaaattgaac

SEQ ID NO: 8 - DNA, 25 bp, synthetic construct
  source 1..25: mol_type = other DNA
gtaaagttaaaaacccaaatttaac

SEQ ID NO: 9 - DNA, 25 bp, synthetic construct
  source 1..25: mol_type = other DNA
gtaaagttaaaaacccaaattgaat

SEQ ID NO: 10 - DNA, 25 bp, synthetic construct
  source 1..25: mol_type = other DNA
gtaaatttaaaaacccaaattgaac

SEQ ID NO: 11 - DNA, 25 bp, synthetic construct
  source 1..25: mol_type = other DNA
ataaaattaaaaacccaaattgaac

SEQ ID NO: 12 - DNA, 25 bp, synthetic construct
  source 1..25: mol_type = other DNA
gtaaagttaaaaacccaaattaaac

SEQ ID NO: 13 - DNA, 25 bp, synthetic construct
  source 1..25: mol_type = other DNA
gtaaaattaaaaacccaaattaaac

SEQ ID NO: 14 - DNA, 25 bp, synthetic construct
  source 1..25: mol_type = other DNA
tgtaaagttaaaaatccaaattgaa

SEQ ID NO: 15 - DNA, 25 bp, synthetic construct
  source 1..25: mol_type = other DNA
tgtaaagttaaaaactcaaattgaa

SEQ ID NO: 16 - DNA, 25 bp, synthetic construct
  source 1..25: mol_type = other DNA
tgtaaagttaaaaacctaaattgaa

SEQ ID NO: 17 - DNA, 25 bp, synthetic construct
  source 1..25: mol_type = other DNA
tttaaagttaaaaacccaaattgaa

SEQ ID NO: 18 - DNA, 25 bp, synthetic construct
  source 1..25: mol_type = other DNA
tgtaaagttaaaaacccaaatttaa

SEQ ID NO: 19 - DNA, 25 bp, synthetic construct
  source 1..25: mol_type = other DNA
tgtaaatttaaaaacccaaattgaa

SEQ ID NO: 20 - DNA, 25 bp, synthetic construct
  source 1..25: mol_type = other DNA
tgtaaagttaaaaacccaaattaaa

SEQ ID NO: 21 - DNA, 25 bp, synthetic construct
  source 1..25: mol_type = other DNA
tgtaaaattaaaaacccaaattaaa

SEQ ID NO: 22 - DNA, 25 bp, synthetic construct
  source 1..25: mol_type = other DNA
ctgtaaagttaaaaacccaaattga

SEQ ID NO: 23 - DNA, 25 bp, synthetic construct
  source 1..25: mol_type = other DNA
ttgtaaagttaaaaacccaaattga

SEQ ID NO: 24 - DNA, 25 bp, synthetic construct
  source 1..25: mol_type = other DNA
ctgtaaagttaaaaatccaaattga

SEQ ID NO: 25 - DNA, 25 bp, synthetic construct
  source 1..25: mol_type = other DNA
ctgtaaagttaaaaactcaaattga

SEQ ID NO: 26 - DNA, 25 bp, synthetic construct
  source 1..25: mol_type = other DNA
ctgtaaagttaaaaacctaaattga

SEQ ID NO: 27 - DNA, 25 bp, synthetic construct
  source 1..25: mol_type = other DNA
ctgtaaagttaaaaacccaaattta

SEQ ID NO: 28 - DNA, 25 bp, synthetic construct
  source 1..25: mol_type = other DNA
ctttaaagttaaaaacccaaattga

SEQ ID NO: 29 - DNA, 25 bp, synthetic construct
  source 1..25: mol_type = other DNA
ctgtaaatttaaaaacccaaattga

SEQ ID NO: 30 - DNA, 25 bp, synthetic construct
  source 1..25: mol_type = other DNA
ctgtaaagttaaaaacccaaattaa

SEQ ID NO: 31 - DNA, 25 bp, synthetic construct
  source 1..25: mol_type = other DNA
ctgtaaaattaaaaacccaaattaa

SEQ ID NO: 32 - DNA, 25 bp, synthetic construct
  source 1..25: mol_type = other DNA
tctgtaaagttaaaaacccaaattg

SEQ ID NO: 33 - DNA, 25 bp, synthetic construct
  source 1..25: mol_type = other DNA
cctgtaaagttaaaaatccaaattg

SEQ ID NO: 34 - DNA, 25 bp, synthetic construct
  source 1..25: mol_type = other DNA
cctgtaaagttaaaaactcaaattg

SEQ ID NO: 35 - DNA, 25 bp, synthetic construct
  source 1..25: mol_type = other DNA
cctgtaaagttaaaaacctaaattg

SEQ ID NO: 36 - DNA, 25 bp, synthetic construct
  source 1..25: mol_type = other DNA
cttgtaaagttaaaaacccaaattg

SEQ ID NO: 37 - DNA, 25 bp, synthetic construct
  source 1..25: mol_type = other DNA
cctttaaagttaaaaacccaaattg

SEQ ID NO: 38 - DNA, 25 bp, synthetic construct
  source 1..25: mol_type = other DNA
cctgtaaatttaaaaacccaaattg

SEQ ID NO: 39 - DNA, 25 bp, synthetic construct
  source 1..25: mol_type = other DNA
cctgtaaagttaaaaacccaaatta

SEQ ID NO: 40 - DNA, 25 bp, synthetic construct
  source 1..25: mol_type = other DNA
cctgtaaaattaaaaacccaaatta

SEQ ID NO: 41 - DNA, 25 bp, synthetic construct
  source 1..25: mol_type = other DNA
tcctgtaaagttaaaaacccaaatt

SEQ ID NO: 42 - DNA, 25 bp, synthetic construct
  source 1..25: mol_type = other DNA
ccctgtaaatttaaaaacccaaatt

SEQ ID NO: 43 - DNA, 25 bp, synthetic construct
  source 1..25: mol_type = other DNA
ccctgtaaagttaaaaatccaaatt

SEQ ID NO: 44 - DNA, 25 bp, synthetic construct
  source 1..25: mol_type = other DNA
ccctgtaaagttaaaaactcaaatt

SEQ ID NO: 45 - DNA, 25 bp, synthetic construct
  source 1..25: mol_type = other DNA
ctctgtaaagttaaaaacccaaatt

SEQ ID NO: 46 - DNA, 25 bp, synthetic construct
  source 1..25: mol_type = other DNA
ccctgtaaagttaaaaacctaaatt

SEQ ID NO: 47 - DNA, 25 bp, synthetic construct
  source 1..25: mol_type = other DNA
ccttgtaaagttaaaaacccaaatt

SEQ ID NO: 48 - DNA, 25 bp, synthetic construct
  source 1..25: mol_type = other DNA
ccctttaaagttaaaaacccaaatt

SEQ ID NO: 49 - DNA, 25 bp, synthetic construct
  source 1..25: mol_type = other DNA
ccctgtaaaattaaaaacccaaatt

SEQ ID NO: 50 - DNA, 25 bp, synthetic construct
  source 1..25: mol_type = other DNA
ccctataaaattaaaaacccaaatt

SEQ ID NO: 51 - DNA, 25 bp, synthetic construct
  source 1..25: mol_type = other DNA
accctgtaaagttaaaaacccaaat

SEQ ID NO: 52 - DNA, 25 bp, synthetic construct
  source 1..25: mol_type = other DNA
accctgtaaatttaaaaacccaaat

SEQ ID NO: 53 - DNA, 25 bp, synthetic construct
  source 1..25: mol_type = other DNA
accctgtaaagttaaaaatccaaat

SEQ ID NO: 54 - DNA, 25 bp, synthetic construct
  source 1..25: mol_type = other DNA
atcctgtaaagttaaaaacccaaat

SEQ ID NO: 55 - DNA, 25 bp, synthetic construct
  source 1..25: mol_type = other DNA
accctgtaaagttaaaaactcaaat

SEQ ID NO: 56 - DNA, 25 bp, synthetic construct
  source 1..25: mol_type = other DNA
accctgtaaagttaaaaacctaaat

SEQ ID NO: 57 - DNA, 25 bp, synthetic construct
  source 1..25: mol_type = other DNA
actctgtaaagttaaaaacccaaat

SEQ ID NO: 58 - DNA, 25 bp, synthetic construct
  source 1..25: mol_type = other DNA
accttgtaaagttaaaaacccaaat

SEQ ID NO: 59 - DNA, 25 bp, synthetic construct
  source 1..25: mol_type = other DNA
accctttaaagttaaaaacccaaat

SEQ ID NO: 60 - DNA, 25 bp, synthetic construct
  source 1..25: mol_type = other DNA
accctgtaaaattaaaaacccaaat

SEQ ID NO: 61 - DNA, 25 bp, synthetic construct
  source 1..25: mol_type = other DNA
accctataaaattaaaaacccaaat

SEQ ID NO: 62 - DNA, 25 bp, synthetic construct
  source 1..25: mol_type = other DNA
gaccctgtaaagttaaaaacccaaa

SEQ ID NO: 63 - DNA, 25 bp, synthetic construct
  source 1..25: mol_type = other DNA
taccctgtaaagttaaaaacccaaa

SEQ ID NO: 64 - DNA, 25 bp, synthetic construct
  source 1..25: mol_type = other DNA
gaccctgtaaatttaaaaacccaaa

SEQ ID NO: 65 - DNA, 25 bp, synthetic construct
  source 1..25: mol_type = other DNA
gaccctgtaaagttaaaaatccaaa

SEQ ID NO: 66 - DNA, 25 bp, synthetic construct
  source 1..25: mol_type = other DNA
gaccctgtaaagttaaaaactcaaa

SEQ ID NO: 67 - DNA, 25 bp, synthetic construct
  source 1..25: mol_type = other DNA
gaccctgtaaagttaaaaacctaaa

SEQ ID NO: 68 - DNA, 25 bp, synthetic construct
  source 1..25: mol_type = other DNA
gatcctgtaaagttaaaaacccaaa

SEQ ID NO: 69 - DNA, 25 bp, synthetic construct
  source 1..25: mol_type = other DNA
gactctgtaaagttaaaaacccaaa

SEQ ID NO: 70 - DNA, 25 bp, synthetic construct
  source 1..25: mol_type = other DNA
gaccttgtaaagttaaaaacccaaa

SEQ ID NO: 71 - DNA, 25 bp, synthetic construct
  source 1..25: mol_type = other DNA
gaccctttaaagttaaaaacccaaa

SEQ ID NO: 72 - DNA, 25 bp, synthetic construct
  source 1..25: mol_type = other DNA
gaccctgtaaaattaaaaacccaaa

SEQ ID NO: 73 - DNA, 25 bp, synthetic construct
  source 1..25: mol_type = other DNA
gaccctataaaattaaaaacccaaa

SEQ ID NO: 74 - DNA, 25 bp, synthetic construct
  source 1..25: mol_type = other DNA
tgaccctgtaaatttaaaaacccaa

SEQ ID NO: 75 - DNA, 25 bp, synthetic construct
  source 1..25: mol_type = other DNA
ttaccctgtaaagttaaaaacccaa

SEQ ID NO: 76 - DNA, 25 bp, synthetic construct
  source 1..25: mol_type = other DNA
tgaccctgtaaagttaaaaatccaa

SEQ ID NO: 77 - DNA, 25 bp, synthetic construct
  source 1..25: mol_type = other DNA
tgaccctgtaaagttaaaaactcaa

SEQ ID NO: 78 - DNA, 25 bp, synthetic construct
  source 1..25: mol_type = other DNA
tgaccctgtaaagttaaaaacctaa

SEQ ID NO: 79 - DNA, 25 bp, synthetic construct
  source 1..25: mol_type = other DNA
tgatcctgtaaagttaaaaacccaa

SEQ ID NO: 80 - DNA, 25 bp, synthetic construct
  source 1..25: mol_type = other DNA
tgactctgtaaagttaaaaacccaa

SEQ ID NO: 81 - DNA, 25 bp, synthetic construct
  source 1..25: mol_type = other DNA
tgaccttgtaaagttaaaaacccaa

SEQ ID NO: 82 - DNA, 25 bp, synthetic construct
  source 1..25: mol_type = other DNA
tgaccctttaaagttaaaaacccaa

SEQ ID NO: 83 - DNA, 25 bp, synthetic construct
  source 1..25: mol_type = other DNA
taaccctgtaaaattaaaaacccaa

SEQ ID NO: 84 - DNA, 25 bp, synthetic construct
  source 1..25: mol_type = other DNA
tgaccctgtaaaattaaaaacccaa

SEQ ID NO: 85 - DNA, 25 bp, synthetic construct
  source 1..25: mol_type = other DNA
tgaccctataaaattaaaaacccaa

SEQ ID NO: 86 - DNA, 25 bp, synthetic construct
  source 1..25: mol_type = other DNA
ctgaccctgtaaagttaaaaaccca

SEQ ID NO: 87 - DNA, 25 bp, synthetic construct
  source 1..25: mol_type = other DNA
ttgaccctgtaaagttaaaaaccca

SEQ ID NO: 88 - DNA, 25 bp, synthetic construct
  source 1..25: mol_type = other DNA
ctgaccctgtaaatttaaaaaccca

SEQ ID NO: 89 - DNA, 25 bp, synthetic construct
  source 1..25: mol_type = other DNA
ctgaccctgtaaagttaaaaatcca

SEQ ID NO: 90 - DNA, 25 bp, synthetic construct
  source 1..25: mol_type = other DNA
ctgaccctgtaaagttaaaaactca

SEQ ID NO: 91 - DNA, 25 bp, synthetic construct
  source 1..25: mol_type = other DNA
ctgaccctgtaaagttaaaaaccta

SEQ ID NO: 92 - DNA, 25 bp, synthetic construct
  source 1..25: mol_type = other DNA
cttaccctgtaaagttaaaaaccca

SEQ ID NO: 93 - DNA, 25 bp, synthetic construct
  source 1..25: mol_type = other DNA
ctgatcctgtaaagttaaaaaccca

SEQ ID NO: 94 - DNA, 25 bp, synthetic construct
  source 1..25: mol_type = other DNA
ctgactctgtaaagttaaaaaccca

SEQ ID NO: 95 - DNA, 25 bp, synthetic construct
  source 1..25: mol_type = other DNA
ctgaccttgtaaagttaaaaaccca

SEQ ID NO: 96 - DNA, 25 bp, synthetic construct
  source 1..25: mol_type = other DNA
ctgaccctttaaagttaaaaaccca

SEQ ID NO: 97 - DNA, 25 bp, synthetic construct
  source 1..25: mol_type = other DNA
ctaaccctgtaaaattaaaaaccca

SEQ ID NO: 98 - DNA, 25 bp, synthetic construct
  source 1..25: mol_type = other DNA
ctgaccctgtaaaattaaaaaccca

SEQ ID NO: 99 - DNA, 25 bp, synthetic construct
  source 1..25: mol_type = other DNA
ctgaccctataaaattaaaaaccca

SEQ ID NO: 100 - DNA, 25 bp, synthetic construct
  source 1..25: mol_type = other DNA
actgaccctgtaaagttaaaaaccc

SEQ ID NO: 101 - DNA, 25 bp, synthetic construct
  source 1..25: mol_type = other DNA
actgaccctttaaagttaaaaaccc

SEQ ID NO: 102 - DNA, 25 bp, synthetic construct
  source 1..25: mol_type = other DNA
actgaccctgtaaatttaaaaaccc

SEQ ID NO: 103 - DNA, 25 bp, synthetic construct
  source 1..25: mol_type = other DNA
attgaccctgtaaagttaaaaaccc

SEQ ID NO: 104 - DNA, 25 bp, synthetic construct
  source 1..25: mol_type = other DNA
actgaccctgtaaagttaaaaatcc

SEQ ID NO: 105 - DNA, 25 bp, synthetic construct
  source 1..25: mol_type = other DNA
actgaccctgtaaagttaaaaactc

SEQ ID NO: 106 - DNA, 25 bp, synthetic construct
  source 1..25: mol_type = other DNA
actgaccctgtaaagttaaaaacct

SEQ ID NO: 107 - DNA, 25 bp, synthetic construct
  source 1..25: mol_type = other DNA
acttaccctgtaaagttaaaaaccc

SEQ ID NO: 108 - DNA, 25 bp, synthetic construct
  source 1..25: mol_type = other DNA
actgatcctgtaaagttaaaaaccc

SEQ ID NO: 109 - DNA, 25 bp, synthetic construct
  source 1..25: mol_type = other DNA
actgactctgtaaagttaaaaaccc

SEQ ID NO: 110 - DNA, 25 bp, synthetic construct
  source 1..25: mol_type = other DNA
actgaccttgtaaagttaaaaaccc

SEQ ID NO: 111 - DNA, 25 bp, synthetic construct
  source 1..25: mol_type = other DNA
actaaccctgtaaaattaaaaaccc

SEQ ID NO: 112 - DNA, 25 bp, synthetic construct
  source 1..25: mol_type = other DNA
actgaccctgtaaaattaaaaaccc

SEQ ID NO: 113 - DNA, 25 bp, synthetic construct
  source 1..25: mol_type = other DNA
actgaccctataaaattaaaaaccc

SEQ ID NO: 114 - DNA, 25 bp, synthetic construct
  source 1..25: mol_type = other DNA
aactgaccctttaaagttaaaaacc

SEQ ID NO: 115 - DNA, 25 bp, synthetic construct
  source 1..25: mol_type = other DNA
aactgaccctgtaaatttaaaaacc

SEQ ID NO: 116 - DNA, 25 bp, synthetic construct
  source 1..25: mol_type = other DNA
aactgaccctgtaaagttaaaaatc

SEQ ID NO: 117 - DNA, 25 bp, synthetic construct
  source 1..25: mol_type = other DNA
aactgaccctgtaaagttaaaaact

SEQ ID NO: 118 - DNA, 25 bp, synthetic construct
  source 1..25: mol_type = other DNA
aattgaccctgtaaagttaaaaacc

SEQ ID NO: 119 - DNA, 25 bp, synthetic construct
  source 1..25: mol_type = other DNA
aacttaccctgtaaagttaaaaacc

SEQ ID NO: 120 - DNA, 25 bp, synthetic construct
  source 1..25: mol_type = other DNA
aactgatcctgtaaagttaaaaacc

SEQ ID NO: 121 - DNA, 25 bp, synthetic construct
  source 1..25: mol_type = other DNA
aactgactctgtaaagttaaaaacc

SEQ ID NO: 122 - DNA, 25 bp, synthetic construct
  source 1..25: mol_type = other DNA
aactgaccttgtaaagttaaaaacc

SEQ ID NO: 123 - DNA, 25 bp, synthetic construct
  source 1..25: mol_type = other DNA
aactaaccctgtaaaattaaaaacc

SEQ ID NO: 124 - DNA, 25 bp, synthetic construct
  source 1..25: mol_type = other DNA
aactgaccctgtaaaattaaaaacc

SEQ ID NO: 125 - DNA, 25 bp, synthetic construct
  source 1..25: mol_type = other DNA
aactgaccctataaaattaaaaacc

SEQ ID NO: 126 - DNA, 25 bp, synthetic construct
  source 1..25: mol_type = other DNA
gaactgaccctgtaaagttaaaaac

SEQ ID NO: 127 - DNA, 25 bp, synthetic construct
  source 1..25: mol_type = other DNA
taactgaccctgtaaagttaaaaac

SEQ ID NO: 128 - DNA, 25 bp, synthetic construct
  source 1..25: mol_type = other DNA
gaactgaccttgtaaagttaaaaac

SEQ ID NO: 129 - DNA, 25 bp, synthetic construct
  source 1..25: mol_type = other DNA
gaactgaccctttaaagttaaaaac

SEQ ID NO: 130 - DNA, 25 bp, synthetic construct
  source 1..25: mol_type = other DNA
gaactgaccctgtaaatttaaaaac

SEQ ID NO: 131 - DNA, 25 bp, synthetic construct
  source 1..25: mol_type = other DNA
gaactgaccctgtaaagttaaaaat

SEQ ID NO: 132 - DNA, 25 bp, synthetic construct
  source 1..25: mol_type = other DNA
gaattgaccctgtaaagttaaaaac

SEQ ID NO: 133 - DNA, 25 bp, synthetic construct
  source 1..25: mol_type = other DNA
gaacttaccctgtaaagttaaaaac

SEQ ID NO: 134 - DNA, 25 bp, synthetic construct
  source 1..25: mol_type = other DNA
gaactgatcctgtaaagttaaaaac

SEQ ID NO: 135 - DNA, 25 bp, synthetic construct
  source 1..25: mol_type = other DNA
gaactgactctgtaaagttaaaaac

SEQ ID NO: 136 - DNA, 25 bp, synthetic construct
  source 1..25: mol_type = other DNA
aaactgaccctataaagttaaaaac

SEQ ID NO: 137 - DNA, 25 bp, synthetic construct
  source 1..25: mol_type = other DNA
aaactgaccctgtaaaattaaaaac

SEQ ID NO: 138 - DNA, 25 bp, synthetic construct
  source 1..25: mol_type = other DNA
aaactaaccctgtaaagttaaaaac

SEQ ID NO: 139 - DNA, 25 bp, synthetic construct
  source 1..25: mol_type = other DNA
gaactaaccctgtaaaattaaaaac

SEQ ID NO: 140 - DNA, 25 bp, synthetic construct
  source 1..25: mol_type = other DNA
gaactgaccctgtaaaattaaaaac

SEQ ID NO: 141 - DNA, 25 bp, synthetic construct
  source 1..25: mol_type = other DNA
gaactgaccctataaaattaaaaac

SEQ ID NO: 142 - DNA, 25 bp, synthetic construct
  source 1..25: mol_type = other DNA
ggaactgaccctgtaaagttaaaaa

SEQ ID NO: 143 - DNA, 25 bp, synthetic construct
  source 1..25: mol_type = other DNA
tgaactgaccctgtaaagttaaaaa

SEQ ID NO: 144 - DNA, 25 bp, synthetic construct
  source 1..25: mol_type = other DNA
ggaactgactctgtaaagttaaaaa

SEQ ID NO: 145 - DNA, 25 bp, synthetic construct
  source 1..25: mol_type = other DNA
ggaactgaccttgtaaagttaaaaa

SEQ ID NO: 146 - DNA, 25 bp, synthetic construct
  source 1..25: mol_type = other DNA
ggaactgaccctttaaagttaaaaa

SEQ ID NO: 147 - DNA, 25 bp, synthetic construct
  source 1..25: mol_type = other DNA
ggaactgaccctgtaaatttaaaaa

SEQ ID NO: 148 - DNA, 25 bp, synthetic construct
  source 1..25: mol_type = other DNA
gtaactgaccctgtaaagttaaaaa

SEQ ID NO: 149 - DNA, 25 bp, synthetic construct
  source 1..25: mol_type = other DNA
ggaattgaccctgtaaagttaaaaa

SEQ ID NO: 150 - DNA, 25 bp, synthetic construct
  source 1..25: mol_type = other DNA
ggaacttaccctgtaaagttaaaaa

SEQ ID NO: 151 - DNA, 25 bp, synthetic construct
  source 1..25: mol_type = other DNA
ggaactgatcctgtaaagttaaaaa

SEQ ID NO: 152 - DNA, 25 bp, synthetic construct
  source 1..25: mol_type = other DNA
agaactgaccctataaagttaaaaa

SEQ ID NO: 153 - DNA, 25 bp, synthetic construct
  source 1..25: mol_type = other DNA
agaactgaccctgtaaaattaaaaa

SEQ ID NO: 154 - DNA, 25 bp, synthetic construct
  source 1..25: mol_type = other DNA
aaaactgaccctgtaaagttaaaaa

SEQ ID NO: 155 - DNA, 25 bp, synthetic construct
  source 1..25: mol_type = other DNA
agaactaaccctgtaaagttaaaaa

SEQ ID NO: 156 - DNA, 25 bp, synthetic construct
  source 1..25: mol_type = other DNA
gaaactgaccctataaagttaaaaa

SEQ ID NO: 157 - DNA, 25 bp, synthetic construct
  source 1..25: mol_type = other DNA
gaaactgaccctgtaaaattaaaaa

SEQ ID NO: 158 - DNA, 25 bp, synthetic construct
  source 1..25: mol_type = other DNA
gaaactaaccctgtaaagttaaaaa

SEQ ID NO: 159 - DNA, 25 bp, synthetic construct
  source 1..25: mol_type = other DNA
ggaactaaccctgtaaaattaaaaa

SEQ ID NO: 160 - DNA, 25 bp, synthetic construct
  source 1..25: mol_type = other DNA
ggaactgaccctgtaaaattaaaaa

SEQ ID NO: 161 - DNA, 25 bp, synthetic construct
  source 1..25: mol_type = other DNA
ggaactgaccctataaaattaaaaa

SEQ ID NO: 162 - DNA, 25 bp, synthetic construct
  source 1..25: mol_type = other DNA
tggaactgaccctgtaaagttaaaa

SEQ ID NO: 163 - DNA, 25 bp, synthetic construct
  source 1..25: mol_type = other DNA
cggaactgatcctgtaaagttaaaa

SEQ ID NO: 164 - DNA, 25 bp, synthetic construct
  source 1..25: mol_type = other DNA
cggaactgactctgtaaagttaaaa

SEQ ID NO: 165 - DNA, 25 bp, synthetic construct
  source 1..25: mol_type = other DNA
cggaactgaccttgtaaagttaaaa

SEQ ID NO: 166 - DNA, 25 bp, synthetic construct
  source 1..25: mol_type = other DNA
cggaactgaccctttaaagttaaaa

SEQ ID NO: 167 - DNA, 25 bp, synthetic construct
  source 1..25: mol_type = other DNA
cggaactgaccctgtaaatttaaaa

SEQ ID NO: 168 - DNA, 25 bp, synthetic construct
  source 1..25: mol_type = other DNA
ctgaactgaccctgtaaagttaaaa

SEQ ID NO: 169 - DNA, 25 bp, synthetic construct
  source 1..25: mol_type = other DNA
cgtaactgaccctgtaaagttaaaa

SEQ ID NO: 170 - DNA, 25 bp, synthetic construct
  source 1..25: mol_type = other DNA
cggaattgaccctgtaaagttaaaa

SEQ ID NO: 171 - DNA, 25 bp, synthetic construct
  source 1..25: mol_type = other DNA
cggaacttaccctgtaaagttaaaa

SEQ ID NO: 172 - DNA, 25 bp, synthetic construct
  source 1..25: mol_type = other DNA
cagaactgaccctataaagttaaaa

SEQ ID NO: 173 - DNA, 25 bp, synthetic construct
  source 1..25: mol_type = other DNA
cagaactgaccctgtaaaattaaaa

SEQ ID NO: 174 - DNA, 25 bp, synthetic construct
  source 1..25: mol_type = other DNA
caaaactgaccctgtaaagttaaaa

SEQ ID NO: 175 - DNA, 25 bp, synthetic construct
  source 1..25: mol_type = other DNA
cagaactaaccctgtaaagttaaaa

SEQ ID NO: 176 - DNA, 25 bp, synthetic construct
  source 1..25: mol_type = other DNA
cgaaactgaccctataaagttaaaa

SEQ ID NO: 177 - DNA, 25 bp, synthetic construct
  source 1..25: mol_type = other DNA
cgaaactgaccctgtaaaattaaaa

SEQ ID NO: 178 - DNA, 25 bp, synthetic construct
  source 1..25: mol_type = other DNA
cgaaactaaccctgtaaagttaaaa

SEQ ID NO: 179 - DNA, 25 bp, synthetic construct
  source 1..25: mol_type = other DNA
cggaactaaccctgtaaaattaaaa

SEQ ID NO: 180 - DNA, 25 bp, synthetic construct
  source 1..25: mol_type = other DNA
cggaactgaccctgtaaaattaaaa

SEQ ID NO: 181 - DNA, 25 bp, synthetic construct
  source 1..25: mol_type = other DNA
cggaactgaccctataaaattaaaa

SEQ ID NO: 182 - DNA, 25 bp, synthetic construct
  source 1..25: mol_type = other DNA
gcggaactgaccctgtaaagttaaa

SEQ ID NO: 183 - DNA, 25 bp, synthetic construct
  source 1..25: mol_type = other DNA
tcggaactgaccctgtaaagttaaa

SEQ ID NO: 184 - DNA, 25 bp, synthetic construct
  source 1..25: mol_type = other DNA
gcggaactgatcctgtaaagttaaa

SEQ ID NO: 185 - DNA, 25 bp, synthetic construct
  source 1..25: mol_type = other DNA
gcggaactgactctgtaaagttaaa

SEQ ID NO: 186 - DNA, 25 bp, synthetic construct
  source 1..25: mol_type = other DNA
gcggaactgaccttgtaaagttaaa

SEQ ID NO: 187 - DNA, 25 bp, synthetic construct
  source 1..25: mol_type = other DNA
gcggaactgaccctttaaagttaaa

SEQ ID NO: 188 - DNA, 25 bp, synthetic construct
  source 1..25: mol_type = other DNA
gtggaactgaccctgtaaagttaaa

SEQ ID NO: 189 - DNA, 25 bp, synthetic construct
  source 1..25: mol_type = other DNA
gcggaactgaccctgtaaatttaaa

SEQ ID NO: 190 - DNA, 25 bp, synthetic construct
  source 1..25: mol_type = other DNA
gctgaactgaccctgtaaagttaaa

SEQ ID NO: 191 - DNA, 25 bp, synthetic construct
  source 1..25: mol_type = other DNA
gcgtaactgaccctgtaaagttaaa

SEQ ID NO: 192 - DNA, 25 bp, synthetic construct
  source 1..25: mol_type = other DNA
gcggaattgaccctgtaaagttaaa

SEQ ID NO: 193 - DNA, 25 bp, synthetic construct
  source 1..25: mol_type = other DNA
gcggaacttaccctgtaaagttaaa

SEQ ID NO: 194 - DNA, 25 bp, synthetic construct
  source 1..25: mol_type = other DNA
acggaactgaccctataaagttaaa

SEQ ID NO: 195 - DNA, 25 bp, synthetic construct
  source 1..25: mol_type = other DNA
acggaactgaccctgtaaaattaaa

SEQ ID NO: 196 - DNA, 25 bp, synthetic construct
  source 1..25: mol_type = other DNA
acagaactgaccctgtaaagttaaa

SEQ ID NO: 197 - DNA, 25 bp, synthetic construct
  source 1..25: mol_type = other DNA
acgaaactgaccctgtaaagttaaa

SEQ ID NO: 198 - DNA, 25 bp, synthetic construct
  source 1..25: mol_type = other DNA
acggaactaaccctgtaaagttaaa

SEQ ID NO: 199 - DNA, 25 bp, synthetic construct
  source 1..25: mol_type = other DNA
gcagaactgaccctataaagttaaa

SEQ ID NO: 200 - DNA, 25 bp, synthetic construct
  source 1..25: mol_type = other DNA
gcagaactgaccctgtaaaattaaa

SEQ ID NO: 201 - DNA, 25 bp, synthetic construct
  source 1..25: mol_type = other DNA
gcaaaactgaccctgtaaagttaaa

SEQ ID NO: 202 - DNA, 25 bp, synthetic construct
  source 1..25: mol_type = other DNA
gcagaactaaccctgtaaagttaaa

SEQ ID NO: 203 - DNA, 25 bp, synthetic construct
  source 1..25: mol_type = other DNA
gcgaaactgaccctataaagttaaa

SEQ ID NO: 204 - DNA, 25 bp, synthetic construct
  source 1..25: mol_type = other DNA
gcgaaactgaccctgtaaaattaaa

SEQ ID NO: 205 - DNA, 25 bp, synthetic construct
  source 1..25: mol_type = other DNA
gcgaaactaaccctgtaaagttaaa

SEQ ID NO: 206 - DNA, 25 bp, synthetic construct
  source 1..25: mol_type = other DNA
gcggaactaaccctgtaaaattaaa

SEQ ID NO: 207 - DNA, 25 bp, synthetic construct
  source 1..25: mol_type = other DNA
gcggaactgaccctgtaaaattaaa

SEQ ID NO: 208 - DNA, 25 bp, synthetic construct
  source 1..25: mol_type = other DNA
gcggaactgaccctataaaattaaa

SEQ ID NO: 209 - DNA, 25 bp, synthetic construct
  source 1..25: mol_type = other DNA
agcggaactgaccctgtaaagttaa

SEQ ID NO: 210 - DNA, 25 bp, synthetic construct
  source 1..25: mol_type = other DNA
agcggaacttaccctgtaaagttaa

SEQ ID NO: 211 - DNA, 25 bp, synthetic construct
  source 1..25: mol_type = other DNA
agcggaactgatcctgtaaagttaa

SEQ ID NO: 212 - DNA, 25 bp, synthetic construct
  source 1..25: mol_type = other DNA
agcggaactgactctgtaaagttaa

SEQ ID NO: 213 - DNA, 25 bp, synthetic construct
  source 1..25: mol_type = other DNA
agcggaactgaccttgtaaagttaa

SEQ ID NO: 214 - DNA, 25 bp, synthetic construct
  source 1..25: mol_type = other DNA
agcggaactgaccctttaaagttaa

SEQ ID NO: 215 - DNA, 25 bp, synthetic construct
  source 1..25: mol_type = other DNA
atcggaactgaccctgtaaagttaa

SEQ ID NO: 216 - DNA, 25 bp, synthetic construct
  source 1..25: mol_type = other DNA
agcggaactgaccctgtaaatttaa

SEQ ID NO: 217 - DNA, 25 bp, synthetic construct
  source 1..25: mol_type = other DNA
agtggaactgaccctgtaaagttaa

SEQ ID NO: 218 - DNA, 25 bp, synthetic construct
  source 1..25: mol_type = other DNA
agctgaactgaccctgtaaagttaa

SEQ ID NO: 219 - DNA, 25 bp, synthetic construct
  source 1..25: mol_type = other DNA
agcgtaactgaccctgtaaagttaa

SEQ ID NO: 220 - DNA, 25 bp, synthetic construct
  source 1..25: mol_type = other DNA
agcggaattgaccctgtaaagttaa

SEQ ID NO: 221 - DNA, 25 bp, synthetic construct
  source 1..25: mol_type = other DNA
agcggaactaaccctgtaaaattaa

SEQ ID NO: 222 - DNA, 25 bp, synthetic construct
  source 1..25: mol_type = other DNA
aacggaactaaccctgtaaagttaa

SEQ ID NO: 223 - DNA, 25 bp, synthetic construct
  source 1..25: mol_type = other DNA
aacggaactgaccctataaagttaa

SEQ ID NO: 224 - DNA, 25 bp, synthetic construct
  source 1..25: mol_type = other DNA
aacggaactgaccctgtaaaattaa

SEQ ID NO: 225 - DNA, 25 bp, synthetic construct
  source 1..25: mol_type = other DNA
aacagaactgaccctgtaaagttaa

SEQ ID NO: 226 - DNA, 25 bp, synthetic construct
  source 1..25: mol_type = other DNA
aacgaaactgaccctgtaaagttaa

SEQ ID NO: 227 - DNA, 25 bp, synthetic construct
  source 1..25: mol_type = other DNA
agcagaactaaccctgtaaagttaa

SEQ ID NO: 228 - DNA, 25 bp, synthetic construct
  source 1..25: mol_type = other DNA
agcagaactgaccctataaagttaa

SEQ ID NO: 229 - DNA, 25 bp, synthetic construct
  source 1..25: mol_type = other DNA
agcagaactgaccctgtaaaattaa

SEQ ID NO: 230 - DNA, 25 bp, synthetic construct
  source 1..25: mol_type = other DNA
agcaaaactgaccctgtaaagttaa

SEQ ID NO: 231 - DNA, 25 bp, synthetic construct
  source 1..25: mol_type = other DNA
agcgaaactaaccctgtaaagttaa

SEQ ID NO: 232 - DNA, 25 bp, synthetic construct
  source 1..25: mol_type = other DNA
agcgaaactgaccctataaagttaa

SEQ ID NO: 233 - DNA, 25 bp, synthetic construct
  source 1..25: mol_type = other DNA
agcgaaactgaccctgtaaaattaa

SEQ ID NO: 234 - DNA, 25 bp, synthetic construct
  source 1..25: mol_type = other DNA
agcggaactgaccctgtaaaattaa

SEQ ID NO: 235 - DNA, 25 bp, synthetic construct
  source 1..25: mol_type = other DNA
agcggaactgaccctataaaattaa

SEQ ID NO: 236 - DNA, 25 bp, synthetic construct
  source 1..25: mol_type = other DNA
aagcggaacttaccctgtaaagtta

SEQ ID NO: 237 - DNA, 25 bp, synthetic construct
  source 1..25: mol_type = other DNA
aagcggaactgatcctgtaaagtta

SEQ ID NO: 238 - DNA, 25 bp, synthetic construct
  source 1..25: mol_type = other DNA
aagcggaactgactctgtaaagtta

SEQ ID NO: 239 - DNA, 25 bp, synthetic construct
  source 1..25: mol_type = other DNA
aagcggaactgaccttgtaaagtta

SEQ ID NO: 240 - DNA, 25 bp, synthetic construct
  source 1..25: mol_type = other DNA
aagcggaactgaccctttaaagtta

SEQ ID NO: 241 - DNA, 25 bp, synthetic construct
  source 1..25: mol_type = other DNA
aagcggaactgaccctgtaaattta

SEQ ID NO: 242 - DNA, 25 bp, synthetic construct
  source 1..25: mol_type = other DNA
aatcggaactgaccctgtaaagtta

SEQ ID NO: 243 - DNA, 25 bp, synthetic construct
  source 1..25: mol_type = other DNA
aagtggaactgaccctgtaaagtta

SEQ ID NO: 244 - DNA, 25 bp, synthetic construct
  source 1..25: mol_type = other DNA
aagctgaactgaccctgtaaagtta

SEQ ID NO: 245 - DNA, 25 bp, synthetic construct
  source 1..25: mol_type = other DNA
aagcgtaactgaccctgtaaagtta

SEQ ID NO: 246 - DNA, 25 bp, synthetic construct
  source 1..25: mol_type = other DNA
aagcggaattgaccctgtaaagtta

SEQ ID NO: 247 - DNA, 25 bp, synthetic construct
  source 1..25: mol_type = other DNA
aagcggaactaaccctgtaaaatta

SEQ ID NO: 248 - DNA, 25 bp, synthetic construct
  source 1..25: mol_type = other DNA
aaacggaactaaccctgtaaagtta

SEQ ID NO: 249 - DNA, 25 bp, synthetic construct
  source 1..25: mol_type = other DNA
aaacggaactgaccctataaagtta

SEQ ID NO: 250 - DNA, 25 bp, synthetic construct
  source 1..25: mol_type = other DNA
aaacggaactgaccctgtaaaatta

SEQ ID NO: 251 - DNA, 25 bp, synthetic construct
  source 1..25: mol_type = other DNA
aaacagaactgaccctgtaaagtta

SEQ ID NO: 252 - DNA, 25 bp, synthetic construct
  source 1..25: mol_type = other DNA
aaacgaaactgaccctgtaaagtta

SEQ ID NO: 253 - DNA, 25 bp, synthetic construct
  source 1..25: mol_type = other DNA
aagcagaactaaccctgtaaagtta

SEQ ID NO: 254 - DNA, 25 bp, synthetic construct
  source 1..25: mol_type = other DNA
aagcagaactgaccctataaagtta

SEQ ID NO: 255 - DNA, 25 bp, synthetic construct
  source 1..25: mol_type = other DNA
aagcagaactgaccctgtaaaatta

SEQ ID NO: 256 - DNA, 25 bp, synthetic construct
  source 1..25: mol_type = other DNA
aagcaaaactgaccctgtaaagtta

SEQ ID NO: 257 - DNA, 25 bp, synthetic construct
  source 1..25: mol_type = other DNA
aagcgaaactaaccctgtaaagtta

SEQ ID NO: 258 - DNA, 25 bp, synthetic construct
  source 1..25: mol_type = other DNA
aagcgaaactgaccctataaagtta

SEQ ID NO: 259 - DNA, 25 bp, synthetic construct
  source 1..25: mol_type = other DNA
aagcgaaactgaccctgtaaaatta

SEQ ID NO: 260 - DNA, 25 bp, synthetic construct
  source 1..25: mol_type = other DNA
aagcggaactgaccctgtaaaatta

SEQ ID NO: 261 - DNA, 25 bp, synthetic construct
  source 1..25: mol_type = other DNA
aagcggaactgaccctataaaatta

SEQ ID NO: 262 - DNA, 25 bp, synthetic construct
  source 1..25: mol_type = other DNA
gaagcggaactgaccctgtaaagtt

SEQ ID NO: 263 - DNA, 25 bp, synthetic construct
  source 1..25: mol_type = other DNA
taagcggaactgaccctgtaaagtt

SEQ ID NO: 264 - DNA, 25 bp, synthetic construct
  source 1..25: mol_type = other DNA
gaagcggaattgaccctgtaaagtt

SEQ ID NO: 265 - DNA, 25 bp, synthetic construct
  source 1..25: mol_type = other DNA
gaagcggaacttaccctgtaaagtt

SEQ ID NO: 266 - DNA, 25 bp, synthetic construct
  source 1..25: mol_type = other DNA
gaagcggaactgatcctgtaaagtt

SEQ ID NO: 267 - DNA, 25 bp, synthetic construct
  source 1..25: mol_type = other DNA
gaagcggaactgactctgtaaagtt

SEQ ID NO: 268 - DNA, 25 bp, synthetic construct
  source 1..25: mol_type = other DNA
gaagcggaactgaccttgtaaagtt

SEQ ID NO: 269 - DNA, 25 bp, synthetic construct
  source 1..25: mol_type = other DNA
gaagcggaactgaccctttaaagtt

SEQ ID NO: 270 - DNA, 25 bp, synthetic construct
  source 1..25: mol_type = other DNA
gaagcggaactgaccctgtaaattt

SEQ ID NO: 271 - DNA, 25 bp, synthetic construct
  source 1..25: mol_type = other DNA
gaatcggaactgaccctgtaaagtt

SEQ ID NO: 272 - DNA, 25 bp, synthetic construct
  source 1..25: mol_type = other DNA
gaagtggaactgaccctgtaaagtt

SEQ ID NO: 273 - DNA, 25 bp, synthetic construct
  source 1..25: mol_type = other DNA
gaagctgaactgaccctgtaaagtt

SEQ ID NO: 274 - DNA, 25 bp, synthetic construct
  source 1..25: mol_type = other DNA
gaagcgtaactgaccctgtaaagtt

SEQ ID NO: 275 - DNA, 25 bp, synthetic construct
  source 1..25: mol_type = other DNA
aaagcggaactaaccctgtaaagtt

SEQ ID NO: 276 - DNA, 25 bp, synthetic construct
  source 1..25: mol_type = other DNA
aaagcggaactgaccctataaagtt

SEQ ID NO: 277 - DNA, 25 bp, synthetic construct
  source 1..25: mol_type = other DNA
aaagcggaactgaccctgtaaaatt

SEQ ID NO: 278 - DNA, 25 bp, synthetic construct
  source 1..25: mol_type = other DNA
aaaacggaactgaccctgtaaagtt

SEQ ID NO: 279 - DNA, 25 bp, synthetic construct
  source 1..25: mol_type = other DNA
aaagcagaactgaccctgtaaagtt

SEQ ID NO: 280 - DNA, 25 bp, synthetic construct
  source 1..25: mol_type = other DNA
aaagcgaaactgaccctgtaaagtt

SEQ ID NO: 281 - DNA, 25 bp, synthetic construct
  source 1..25: mol_type = other DNA
gaagcggaactaaccctgtaaaatt

SEQ ID NO: 282 - DNA, 25 bp, synthetic construct
  source 1..25: mol_type = other DNA
gaaacggaactaaccctgtaaagtt

SEQ ID NO: 283 - DNA, 25 bp, synthetic construct
  source 1..25: mol_type = other DNA
gaaacggaactgaccctataaagtt

SEQ ID NO: 284 - DNA, 25 bp, synthetic construct
  source 1..25: mol_type = other DNA
gaaacggaactgaccctgtaaaatt

SEQ ID NO: 285 - DNA, 25 bp, synthetic construct
  source 1..25: mol_type = other DNA
gaaacagaactgaccctgtaaagtt

SEQ ID NO: 286 - DNA, 25 bp, synthetic construct
  source 1..25: mol_type = other DNA
gaaacgaaactgaccctgtaaagtt

SEQ ID NO: 287 - DNA, 25 bp, synthetic construct
  source 1..25: mol_type = other DNA
gaagcagaactaaccctgtaaagtt

SEQ ID NO: 288 - DNA, 25 bp, synthetic construct
  source 1..25: mol_type = other DNA
gaagcagaactgaccctataaagtt

SEQ ID NO: 289 - DNA, 25 bp, synthetic construct
  source 1..25: mol_type = other DNA
gaagcagaactgaccctgtaaaatt

SEQ ID NO: 290 - DNA, 25 bp, synthetic construct
  source 1..25: mol_type = other DNA
gaagcaaaactgaccctgtaaagtt

SEQ ID NO: 291 - DNA, 25 bp, synthetic construct
  source 1..25: mol_type = other DNA
gaagcgaaactaaccctgtaaagtt

SEQ ID NO: 292 - DNA, 25 bp, synthetic construct
  source 1..25: mol_type = other DNA
gaagcgaaactgaccctataaagtt

SEQ ID NO: 293 - DNA, 25 bp, synthetic construct
  source 1..25: mol_type = other DNA
gaagcgaaactgaccctgtaaaatt

SEQ ID NO: 294 - DNA, 25 bp, synthetic construct
  source 1..25: mol_type = other DNA
gaagcggaactgaccctgtaaaatt

SEQ ID NO: 295 - DNA, 25 bp, synthetic construct
  source 1..25: mol_type = other DNA
gaagcggaactgaccctataaaatt

SEQ ID NO: 296 - DNA, 25 bp, synthetic construct
  source 1..25: mol_type = other DNA
tgaagcggaattgaccctgtaaagt

SEQ ID NO: 297 - DNA, 25 bp, synthetic construct
  source 1..25: mol_type = other DNA
tgaagcggaacttaccctgtaaagt

SEQ ID NO: 298 - DNA, 25 bp, synthetic construct
  source 1..25: mol_type = other DNA
tgaagcggaactgatcctgtaaagt

SEQ ID NO: 299 - DNA, 25 bp, synthetic construct
  source 1..25: mol_type = other DNA
tgaagcggaactgactctgtaaagt

SEQ ID NO: 300 - DNA, 25 bp, synthetic construct
  source 1..25: mol_type = other DNA
tgaagcggaactgaccttgtaaagt

SEQ ID NO: 301 - DNA, 25 bp, synthetic construct
  source 1..25: mol_type = other DNA
tgaagcggaactgaccctttaaagt

SEQ ID NO: 302 - DNA, 25 bp, synthetic construct
  source 1..25: mol_type = other DNA
ttaagcggaactgaccctgtaaagt

SEQ ID NO: 303 - DNA, 25 bp, synthetic construct
  source 1..25: mol_type = other DNA
tgaagcggaactgaccctgtaaatt

SEQ ID NO: 304 - DNA, 25 bp, synthetic construct
  source 1..25: mol_type = other DNA
tgaatcggaactgaccctgtaaagt

SEQ ID NO: 305 - DNA, 25 bp, synthetic construct
  source 1..25: mol_type = other DNA
tgaagtggaactgaccctgtaaagt

SEQ ID NO: 306 - DNA, 25 bp, synthetic construct
  source 1..25: mol_type = other DNA
tgaagctgaactgaccctgtaaagt

SEQ ID NO: 307 - DNA, 25 bp, synthetic construct
  source 1..25: mol_type = other DNA
tgaagcgtaactgaccctgtaaagt

SEQ ID NO: 308 - DNA, 25 bp, synthetic construct
  source 1..25: mol_type = other DNA
tgaagcggaactaaccctgtaaaat

SEQ ID NO: 309 - DNA, 25 bp, synthetic construct
  source 1..25: mol_type = other DNA
taaagcggaactaaccctgtaaagt

SEQ ID NO: 310 - DNA, 25 bp, synthetic construct
  source 1..25: mol_type = other DNA
taaagcggaactgaccctataaagt

SEQ ID NO: 311 - DNA, 25 bp, synthetic construct
  source 1..25: mol_type = other DNA
taaagcggaactgaccctgtaaaat

SEQ ID NO: 312 - DNA, 25 bp, synthetic construct
  source 1..25: mol_type = other DNA
taaaacggaactgaccctgtaaagt

SEQ ID NO: 313 - DNA, 25 bp, synthetic construct
  source 1..25: mol_type = other DNA
taaagcagaactgaccctgtaaagt

SEQ ID NO: 314 - DNA, 25 bp, synthetic construct
  source 1..25: mol_type = other DNA
taaagcgaaactgaccctgtaaagt

SEQ ID NO: 315 - DNA, 25 bp, synthetic construct
  source 1..25: mol_type = other DNA
tgaaacggaactaaccctgtaaagt

SEQ ID NO: 316 - DNA, 25 bp, synthetic construct
  source 1..25: mol_type = other DNA
tgaaacggaactgaccctataaagt

SEQ ID NO: 317 - DNA, 25 bp, synthetic construct
  source 1..25: mol_type = other DNA
tgaaacggaactgaccctgtaaaat

SEQ ID NO: 318 - DNA, 25 bp, synthetic construct
  source 1..25: mol_type = other DNA
tgaaacagaactgaccctgtaaagt

SEQ ID NO: 319 - DNA, 25 bp, synthetic construct
  source 1..25: mol_type = other DNA
tgaaacgaaactgaccctgtaaagt

SEQ ID NO: 320 - DNA, 25 bp, synthetic construct
  source 1..25: mol_type = other DNA
tgaagcagaactaaccctgtaaagt

SEQ ID NO: 321 - DNA, 25 bp, synthetic construct
  source 1..25: mol_type = other DNA
tgaagcagaactgaccctataaagt

SEQ ID NO: 322 - DNA, 25 bp, synthetic construct
  source 1..25: mol_type = other DNA
tgaagcagaactgaccctgtaaaat

SEQ ID NO: 323 - DNA, 25 bp, synthetic construct
  source 1..25: mol_type = other DNA
tgaagcaaaactgaccctgtaaagt

SEQ ID NO: 324 - DNA, 25 bp, synthetic construct
  source 1..25: mol_type = other DNA
tgaagcgaaactaaccctgtaaagt

SEQ ID NO: 325 - DNA, 25 bp, synthetic construct
  source 1..25: mol_type = other DNA
tgaagcgaaactgaccctataaagt

SEQ ID NO: 326 - DNA, 25 bp, synthetic construct
  source 1..25: mol_type = other DNA
tgaagcgaaactgaccctgtaaaat

SEQ ID NO: 327 - DNA, 25 bp, synthetic construct
  source 1..25: mol_type = other DNA
tgaagcggaactgaccctgtaaaat

SEQ ID NO: 328 - DNA, 25 bp, synthetic construct
  source 1..25: mol_type = other DNA
tgaagcggaactgaccctataaaat

SEQ ID NO: 329 - DNA, 25 bp, synthetic construct
  source 1..25: mol_type = other DNA
ttgaagcggaactgaccctgtaaag

SEQ ID NO: 330 - DNA, 25 bp, synthetic construct
  source 1..25: mol_type = other DNA
gtgaagcggaattgaccctgtaaag

SEQ ID NO: 331 - DNA, 25 bp, synthetic construct
  source 1..25: mol_type = other DNA
gtgaagcggaacttaccctgtaaag

SEQ ID NO: 332 - DNA, 25 bp, synthetic construct
  source 1..25: mol_type = other DNA
gtgaagcggaactgatcctgtaaag

SEQ ID NO: 333 - DNA, 25 bp, synthetic construct
  source 1..25: mol_type = other DNA
gtgaagcggaactgactctgtaaag

SEQ ID NO: 334 - DNA, 25 bp, synthetic construct
  source 1..25: mol_type = other DNA
gtgaagcggaactgaccttgtaaag

SEQ ID NO: 335 - DNA, 25 bp, synthetic construct
  source 1..25: mol_type = other DNA
gtgaagcggaactgaccctttaaag

SEQ ID NO: 336 - DNA, 25 bp, synthetic construct
  source 1..25: mol_type = other DNA
gttaagcggaactgaccctgtaaag

SEQ ID NO: 337 - DNA, 25 bp, synthetic construct
  source 1..25: mol_type = other DNA
gtgaatcggaactgaccctgtaaag

SEQ ID NO: 338 - DNA, 25 bp, synthetic construct
  source 1..25: mol_type = other DNA
gtgaagtggaactgaccctgtaaag

SEQ ID NO: 339 - DNA, 25 bp, synthetic construct
  source 1..25: mol_type = other DNA
gtgaagctgaactgaccctgtaaag

SEQ ID NO: 340 - DNA, 25 bp, synthetic construct
  source 1..25: mol_type = other DNA
gtgaagcgtaactgaccctgtaaag

SEQ ID NO: 341 - DNA, 25 bp, synthetic construct
  source 1..25: mol_type = other DNA
atgaagcggaactaaccctgtaaag

SEQ ID NO: 342 - DNA, 25 bp, synthetic construct
  source 1..25: mol_type = other DNA
atgaagcggaactgaccctataaag

SEQ ID NO: 343 - DNA, 25 bp, synthetic construct
  source 1..25: mol_type = other DNA
atgaagcggaactgaccctgtaaaa

SEQ ID NO: 344 - DNA, 25 bp, synthetic construct
  source 1..25: mol_type = other DNA
ataaagcggaactgaccctgtaaag

SEQ ID NO: 345 - DNA, 25 bp, synthetic construct
  source 1..25: mol_type = other DNA
atgaaacggaactgaccctgtaaag

SEQ ID NO: 346 - DNA, 25 bp, synthetic construct
  source 1..25: mol_type = other DNA
atgaagcagaactgaccctgtaaag

SEQ ID NO: 347 - DNA, 25 bp, synthetic construct
  source 1..25: mol_type = other DNA
atgaagcgaaactgaccctgtaaag

SEQ ID NO: 348 - DNA, 25 bp, synthetic construct
  source 1..25: mol_type = other DNA
gtgaagcggaactaaccctgtaaaa

SEQ ID NO: 349 - DNA, 25 bp, synthetic construct
  source 1..25: mol_type = other DNA
gtaaagcggaactaaccctgtaaag

SEQ ID NO: 350 - DNA, 25 bp, synthetic construct
  source 1..25: mol_type = other DNA
gtaaagcggaactgaccctataaag

SEQ ID NO: 351 - DNA, 25 bp, synthetic construct
  source 1..25: mol_type = other DNA
gtaaagcggaactgaccctgtaaaa

SEQ ID NO: 352 - DNA, 25 bp, synthetic construct
  source 1..25: mol_type = other DNA
gtaaaacggaactgaccctgtaaag

SEQ ID NO: 353 - DNA, 25 bp, synthetic construct
  source 1..25: mol_type = other DNA
gtaaagcagaactgaccctgtaaag

SEQ ID NO: 354 - DNA, 25 bp, synthetic construct
  source 1..25: mol_type = other DNA
gtaaagcgaaactgaccctgtaaag

SEQ ID NO: 355 - DNA, 25 bp, synthetic construct
  source 1..25: mol_type = other DNA
gtgaaacggaactaaccctgtaaag

SEQ ID NO: 356 - DNA, 25 bp, synthetic construct
  source 1..25: mol_type = other DNA
gtgaaacggaactgaccctataaag

SEQ ID NO: 357 - DNA, 25 bp, synthetic construct
  source 1..25: mol_type = other DNA
gtgaaacggaactgaccctgtaaaa

SEQ ID NO: 358 - DNA, 25 bp, synthetic construct
  source 1..25: mol_type = other DNA
gtgaaacagaactgaccctgtaaag

SEQ ID NO: 359 - DNA, 25 bp, synthetic construct
  source 1..25: mol_type = other DNA
gtgaaacgaaactgaccctgtaaag

SEQ ID NO: 360 - DNA, 25 bp, synthetic construct
  source 1..25: mol_type = other DNA
gtgaagcagaactaaccctgtaaag

SEQ ID NO: 361 - DNA, 25 bp, synthetic construct
  source 1..25: mol_type = other DNA
gtgaagcagaactgaccctataaag

SEQ ID NO: 362 - DNA, 25 bp, synthetic construct
  source 1..25: mol_type = other DNA
gtgaagcagaactgaccctgtaaaa

SEQ ID NO: 363 - DNA, 25 bp, synthetic construct
  source 1..25: mol_type = other DNA
gtgaagcaaaactgaccctgtaaag

SEQ ID NO: 364 - DNA, 25 bp, synthetic construct
  source 1..25: mol_type = other DNA
gtgaagcgaaactaaccctgtaaag

SEQ ID NO: 365 - DNA, 25 bp, synthetic construct
  source 1..25: mol_type = other DNA
gtgaagcgaaactgaccctataaag

SEQ ID NO: 366 - DNA, 25 bp, synthetic construct
  source 1..25: mol_type = other DNA
gtgaagcgaaactgaccctgtaaaa

SEQ ID NO: 367 - DNA, 25 bp, synthetic construct
  source 1..25: mol_type = other DNA
gtgaagcggaactgaccctgtaaaa

SEQ ID NO: 368 - DNA, 25 bp, synthetic construct
  source 1..25: mol_type = other DNA
gtgaagcggaactgaccctataaaa

SEQ ID NO: 369 - DNA, 25 bp, synthetic construct
  source 1..25: mol_type = other DNA
ggtgaagcggaactgaccctgtaaa

SEQ ID NO: 370 - DNA, 25 bp, synthetic construct
  source 1..25: mol_type = other DNA
tgtgaagcggaactgaccctgtaaa

SEQ ID NO: 371 - DNA, 25 bp, synthetic construct
  source 1..25: mol_type = other DNA
ggtgaagcgtaactgaccctgtaaa

SEQ ID NO: 372 - DNA, 25 bp, synthetic construct
  source 1..25: mol_type = other DNA
ggtgaagcggaattgaccctgtaaa

SEQ ID NO: 373 - DNA, 25 bp, synthetic construct
  source 1..25: mol_type = other DNA
ggtgaagcggaacttaccctgtaaa

SEQ ID NO: 374 - DNA, 25 bp, synthetic construct
  source 1..25: mol_type = other DNA
ggtgaagcggaactgatcctgtaaa

SEQ ID NO: 375 - DNA, 25 bp, synthetic construct
  source 1..25: mol_type = other DNA
ggtgaagcggaactgactctgtaaa

SEQ ID NO: 376 - DNA, 25 bp, synthetic construct
  source 1..25: mol_type = other DNA
ggtgaagcggaactgaccttgtaaa

SEQ ID NO: 377 - DNA, 25 bp, synthetic construct
  source 1..25: mol_type = other DNA
gttgaagcggaactgaccctgtaaa

SEQ ID NO: 378 - DNA, 25 bp, synthetic construct
  source 1..25: mol_type = other DNA
ggtgaagcggaactgaccctttaaa

SEQ ID NO: 379 - DNA, 25 bp, synthetic construct
  source 1..25: mol_type = other DNA
ggttaagcggaactgaccctgtaaa

SEQ ID NO: 380 - DNA, 25 bp, synthetic construct
  source 1..25: mol_type = other DNA
ggtgaatcggaactgaccctgtaaa

SEQ ID NO: 381 - DNA, 25 bp, synthetic construct
  source 1..25: mol_type = other DNA
ggtgaagtggaactgaccctgtaaa

SEQ ID NO: 382 - DNA, 25 bp, synthetic construct
  source 1..25: mol_type = other DNA
ggtgaagctgaactgaccctgtaaa

SEQ ID NO: 383 - DNA, 25 bp, synthetic construct
  source 1..25: mol_type = other DNA
agtgaagcgaaactgaccctgtaaa

SEQ ID NO: 384 - DNA, 25 bp, synthetic construct
  source 1..25: mol_type = other DNA
agtgaagcggaactaaccctgtaaa

SEQ ID NO: 385 - DNA, 25 bp, synthetic construct
  source 1..25: mol_type = other DNA
aatgaagcggaactgaccctgtaaa

SEQ ID NO: 386 - DNA, 25 bp, synthetic construct
  source 1..25: mol_type = other DNA
agtgaagcggaactgaccctataaa

SEQ ID NO: 387 - DNA, 25 bp, synthetic construct
  source 1..25: mol_type = other DNA
agtaaagcggaactgaccctgtaaa

SEQ ID NO: 388 - DNA, 25 bp, synthetic construct
  source 1..25: mol_type = other DNA
agtgaaacggaactgaccctgtaaa

SEQ ID NO: 389 - DNA, 25 bp, synthetic construct
  source 1..25: mol_type = other DNA
agtgaagcagaactgaccctgtaaa

SEQ ID NO: 390 - DNA, 25 bp, synthetic construct
  source 1..25: mol_type = other DNA
ggtgaagcgaaactaaccctgtaaa

SEQ ID NO: 391 - DNA, 25 bp, synthetic construct
  source 1..25: mol_type = other DNA
ggtgaagcgaaactgaccctataaa

SEQ ID NO: 392 - DNA, 25 bp, synthetic construct
  source 1..25: mol_type = other DNA
gatgaagcgaaactgaccctgtaaa

SEQ ID NO: 393 - DNA, 25 bp, synthetic construct
  source 1..25: mol_type = other DNA
gatgaagcggaactaaccctgtaaa

SEQ ID NO: 394 - DNA, 25 bp, synthetic construct
  source 1..25: mol_type = other DNA
gatgaagcggaactgaccctataaa

SEQ ID NO: 395 - DNA, 25 bp, synthetic construct
  source 1..25: mol_type = other DNA
gataaagcggaactgaccctgtaaa

SEQ ID NO: 396 - DNA, 25 bp, synthetic construct
  source 1..25: mol_type = other DNA
gatgaaacggaactgaccctgtaaa

SEQ ID NO: 397 - DNA, 25 bp, synthetic construct
  source 1..25: mol_type = other DNA
gatgaagcagaactgaccctgtaaa

SEQ ID NO: 398 - DNA, 25 bp, synthetic construct
  source 1..25: mol_type = other DNA
ggtaaagcgaaactgaccctgtaaa

SEQ ID NO: 399 - DNA, 25 bp, synthetic construct
  source 1..25: mol_type = other DNA
ggtaaagcggaactaaccctgtaaa

SEQ ID NO: 400 - DNA, 25 bp, synthetic construct
  source 1..25: mol_type = other DNA
ggtaaagcggaactgaccctataaa

SEQ ID NO: 401 - DNA, 25 bp, synthetic construct
  source 1..25: mol_type = other DNA
ggtaaaacggaactgaccctgtaaa

SEQ ID NO: 402 - DNA, 25 bp, synthetic construct
  source 1..25: mol_type = other DNA
ggtaaagcagaactgaccctgtaaa

SEQ ID NO: 403 - DNA, 25 bp, synthetic construct
  source 1..25: mol_type = other DNA
ggtgaaacgaaactgaccctgtaaa

SEQ ID NO: 404 - DNA, 25 bp, synthetic construct
  source 1..25: mol_type = other DNA
ggtgaaacggaactaaccctgtaaa

SEQ ID NO: 405 - DNA, 25 bp, synthetic construct
  source 1..25: mol_type = other DNA
ggtgaaacggaactgaccctataaa

SEQ ID NO: 406 - DNA, 25 bp, synthetic construct
  source 1..25: mol_type = other DNA
ggtgaaacagaactgaccctgtaaa

SEQ ID NO: 407 - DNA, 25 bp, synthetic construct
  source 1..25: mol_type = other DNA
ggtgaagcaaaactgaccctgtaaa

SEQ ID NO: 408 - DNA, 25 bp, synthetic construct
  source 1..25: mol_type = other DNA
ggtgaagcagaactaaccctgtaaa

SEQ ID NO: 409 - DNA, 25 bp, synthetic construct
  source 1..25: mol_type = other DNA
ggtgaagcagaactgaccctataaa

SEQ ID NO: 410 - DNA, 25 bp, synthetic construct
  source 1..25: mol_type = other DNA
ggtgaagcggaactgaccctataaa

SEQ ID NO: 411 - DNA, 25 bp, synthetic construct
  source 1..25: mol_type = other DNA
aggtgaagcggaactgaccctgtaa

SEQ ID NO: 412 - DNA, 25 bp, synthetic construct
  source 1..25: mol_type = other DNA
aggtgaagctgaactgaccctgtaa

SEQ ID NO: 413 - DNA, 25 bp, synthetic construct
  source 1..25: mol_type = other DNA
aggtgaagcgtaactgaccctgtaa

SEQ ID NO: 414 - DNA, 25 bp, synthetic construct
  source 1..25: mol_type = other DNA
aggtgaagcggaattgaccctgtaa

SEQ ID NO: 415 - DNA, 25 bp, synthetic construct
  source 1..25: mol_type = other DNA
aggtgaagcggaacttaccctgtaa

SEQ ID NO: 416 - DNA, 25 bp, synthetic construct
  source 1..25: mol_type = other DNA
aggtgaagcggaactgatcctgtaa

SEQ ID NO: 417 - DNA, 25 bp, synthetic construct
  source 1..25: mol_type = other DNA
aggtgaagcggaactgactctgtaa

SEQ ID NO: 418 - DNA, 25 bp, synthetic construct
  source 1..25: mol_type = other DNA
atgtgaagcggaactgaccctgtaa

SEQ ID NO: 419 - DNA, 25 bp, synthetic construct
  source 1..25: mol_type = other DNA
aggtgaagcggaactgaccttgtaa

SEQ ID NO: 420 - DNA, 25 bp, synthetic construct
  source 1..25: mol_type = other DNA
aggtgaagcggaactgaccctttaa

SEQ ID NO: 421 - DNA, 25 bp, synthetic construct
  source 1..25: mol_type = other DNA
agttgaagcggaactgaccctgtaa

SEQ ID NO: 422 - DNA, 25 bp, synthetic construct
  source 1..25: mol_type = other DNA
aggttaagcggaactgaccctgtaa

SEQ ID NO: 423 - DNA, 25 bp, synthetic construct
  source 1..25: mol_type = other DNA
aggtgaatcggaactgaccctgtaa

SEQ ID NO: 424 - DNA, 25 bp, synthetic construct
  source 1..25: mol_type = other DNA
aggtgaagtggaactgaccctgtaa

SEQ ID NO: 425 - DNA, 25 bp, synthetic construct
  source 1..25: mol_type = other DNA
aggtgaagcaaaactgaccctgtaa

SEQ ID NO: 426 - DNA, 25 bp, synthetic construct
  source 1..25: mol_type = other DNA
aggtgaagcagaactaaccctgtaa

SEQ ID NO: 427 - DNA, 25 bp, synthetic construct
  source 1..25: mol_type = other DNA
aggtgaagcagaactgaccctataa

SEQ ID NO: 428 - DNA, 25 bp, synthetic construct
  source 1..25: mol_type = other DNA
aggtgaagcgaaactaaccctgtaa

SEQ ID NO: 429 - DNA, 25 bp, synthetic construct
  source 1..25: mol_type = other DNA
aggtgaagcgaaactgaccctataa

SEQ ID NO: 430 - DNA, 25 bp, synthetic construct
  source 1..25: mol_type = other DNA
aagtgaagcagaactgaccctgtaa

SEQ ID NO: 431 - DNA, 25 bp, synthetic construct
  source 1..25: mol_type = other DNA
aagtgaagcgaaactgaccctgtaa

SEQ ID NO: 432 - DNA, 25 bp, synthetic construct
  source 1..25: mol_type = other DNA
aagtgaagcggaactaaccctgtaa

SEQ ID NO: 433 - DNA, 25 bp, synthetic construct
  source 1..25: mol_type = other DNA
aagtgaagcggaactgaccctataa

SEQ ID NO: 434 - DNA, 25 bp, synthetic construct
  source 1..25: mol_type = other DNA
aaatgaagcggaactgaccctgtaa

SEQ ID NO: 435 - DNA, 25 bp, synthetic construct
  source 1..25: mol_type = other DNA
aagtaaagcggaactgaccctgtaa

SEQ ID NO: 436 - DNA, 25 bp, synthetic construct
  source 1..25: mol_type = other DNA
aagtgaaacggaactgaccctgtaa

SEQ ID NO: 437 - DNA, 25 bp, synthetic construct
  source 1..25: mol_type = other DNA
agatgaagcagaactgaccctgtaa

SEQ ID NO: 438 - DNA, 25 bp, synthetic construct
  source 1..25: mol_type = other DNA
agatgaagcgaaactgaccctgtaa

SEQ ID NO: 439 - DNA, 25 bp, synthetic construct
  source 1..25: mol_type = other DNA
agatgaagcggaactaaccctgtaa

SEQ ID NO: 440 - DNA, 25 bp, synthetic construct
  source 1..25: mol_type = other DNA
agatgaagcggaactgaccctataa

SEQ ID NO: 441 - DNA, 25 bp, synthetic construct
  source 1..25: mol_type = other DNA
agataaagcggaactgaccctgtaa

SEQ ID NO: 442 - DNA, 25 bp, synthetic construct
  source 1..25: mol_type = other DNA
agatgaaacggaactgaccctgtaa

SEQ ID NO: 443 - DNA, 25 bp, synthetic construct
  source 1..25: mol_type = other DNA
aggtaaagcagaactgaccctgtaa

SEQ ID NO: 444 - DNA, 25 bp, synthetic construct
  source 1..25: mol_type = other DNA
aggtaaagcgaaactgaccctgtaa

SEQ ID NO: 445 - DNA, 25 bp, synthetic construct
  source 1..25: mol_type = other DNA
aggtaaagcggaactaaccctgtaa

SEQ ID NO: 446 - DNA, 25 bp, synthetic construct
  source 1..25: mol_type = other DNA
aggtaaagcggaactgaccctataa

SEQ ID NO: 447 - DNA, 25 bp, synthetic construct
  source 1..25: mol_type = other DNA
aggtaaaacggaactgaccctgtaa

SEQ ID NO: 448 - DNA, 25 bp, synthetic construct
  source 1..25: mol_type = other DNA
aggtgaaacagaactgaccctgtaa

SEQ ID NO: 449 - DNA, 25 bp, synthetic construct
  source 1..25: mol_type = other DNA
aggtgaaacgaaactgaccctgtaa

SEQ ID NO: 450 - DNA, 25 bp, synthetic construct
  source 1..25: mol_type = other DNA
aggtgaaacggaactaaccctgtaa

SEQ ID NO: 451 - DNA, 25 bp, synthetic construct
  source 1..25: mol_type = other DNA
aggtgaaacggaactgaccctataa

SEQ ID NO: 452 - DNA, 25 bp, synthetic construct
  source 1..25: mol_type = other DNA
aggtgaagcggaactgaccctataa

SEQ ID NO: 453 - DNA, 25 bp, synthetic construct
  source 1..25: mol_type = other DNA
taggtgaagcggaactgaccctgta

SEQ ID NO: 454 - DNA, 25 bp, synthetic construct
  source 1..25: mol_type = other DNA
gaggtgaagtggaactgaccctgta

SEQ ID NO: 455 - DNA, 25 bp, synthetic construct
  source 1..25: mol_type = other DNA
gaggtgaagctgaactgaccctgta

SEQ ID NO: 456 - DNA, 25 bp, synthetic construct
  source 1..25: mol_type = other DNA
gaggtgaagcgtaactgaccctgta

SEQ ID NO: 457 - DNA, 25 bp, synthetic construct
  source 1..25: mol_type = other DNA
gaggtgaagcggaattgaccctgta

SEQ ID NO: 458 - DNA, 25 bp, synthetic construct
  source 1..25: mol_type = other DNA
gaggtgaagcggaacttaccctgta

SEQ ID NO: 459 - DNA, 25 bp, synthetic construct
  source 1..25: mol_type = other DNA
gaggtgaagcggaactgatcctgta

SEQ ID NO: 460 - DNA, 25 bp, synthetic construct
  source 1..25: mol_type = other DNA
gaggtgaagcggaactgactctgta

SEQ ID NO: 461 - DNA, 25 bp, synthetic construct
  source 1..25: mol_type = other DNA
gaggtgaagcggaactgaccttgta

SEQ ID NO: 462 - DNA, 25 bp, synthetic construct
  source 1..25: mol_type = other DNA
gaggtgaagcggaactgacccttta

SEQ ID NO: 463 - DNA, 25 bp, synthetic construct
  source 1..25: mol_type = other DNA
gatgtgaagcggaactgaccctgta

SEQ ID NO: 464 - DNA, 25 bp, synthetic construct
  source 1..25: mol_type = other DNA
gagttgaagcggaactgaccctgta

SEQ ID NO: 465 - DNA, 25 bp, synthetic construct
  source 1..25: mol_type = other DNA
gaggttaagcggaactgaccctgta

SEQ ID NO: 466 - DNA, 25 bp, synthetic construct
  source 1..25: mol_type = other DNA
gaggtgaatcggaactgaccctgta

SEQ ID NO: 467 - DNA, 25 bp, synthetic construct
  source 1..25: mol_type = other DNA
aaggtgaagcagaactgaccctgta

SEQ ID NO: 468 - DNA, 25 bp, synthetic construct
  source 1..25: mol_type = other DNA
aaggtgaagcgaaactgaccctgta

SEQ ID NO: 469 - DNA, 25 bp, synthetic construct
  source 1..25: mol_type = other DNA
aaggtgaagcggaactaaccctgta

SEQ ID NO: 470 - DNA, 25 bp, synthetic construct
  source 1..25: mol_type = other DNA
aaggtgaagcggaactgaccctata

SEQ ID NO: 471 - DNA, 25 bp, synthetic construct
  source 1..25: mol_type = other DNA
aaagtgaagcggaactgaccctgta

SEQ ID NO: 472 - DNA, 25 bp, synthetic construct
  source 1..25: mol_type = other DNA
aagatgaagcggaactgaccctgta

SEQ ID NO: 473 - DNA, 25 bp, synthetic construct
  source 1..25: mol_type = other DNA
aaggtaaagcggaactgaccctgta

SEQ ID NO: 474 - DNA, 25 bp, synthetic construct
  source 1..25: mol_type = other DNA
aaggtgaaacggaactgaccctgta

SEQ ID NO: 475 - DNA, 25 bp, synthetic construct
  source 1..25: mol_type = other DNA
gaggtgaagcaaaactgaccctgta

SEQ ID NO: 476 - DNA, 25 bp, synthetic construct
  source 1..25: mol_type = other DNA
gaggtgaagcagaactaaccctgta

SEQ ID NO: 477 - DNA, 25 bp, synthetic construct
  source 1..25: mol_type = other DNA
gaggtgaagcagaactgaccctata

SEQ ID NO: 478 - DNA, 25 bp, synthetic construct
  source 1..25: mol_type = other DNA
gaggtgaagcgaaactaaccctgta

SEQ ID NO: 479 - DNA, 25 bp, synthetic construct
  source 1..25: mol_type = other DNA
gaggtgaagcgaaactgaccctata

SEQ ID NO: 480 - DNA, 25 bp, synthetic construct
  source 1..25: mol_type = other DNA
gaagtgaagcagaactgaccctgta

SEQ ID NO: 481 - DNA, 25 bp, synthetic construct
  source 1..25: mol_type = other DNA
gaagtgaagcgaaactgaccctgta

SEQ ID NO: 482 - DNA, 25 bp, synthetic construct
  source 1..25: mol_type = other DNA
gaagtgaagcggaactaaccctgta

SEQ ID NO: 483 - DNA, 25 bp, synthetic construct
  source 1..25: mol_type = other DNA
gaagtgaagcggaactgaccctata

SEQ ID NO: 484 - DNA, 25 bp, synthetic construct
  source 1..25: mol_type = other DNA
gaaatgaagcggaactgaccctgta

SEQ ID NO: 485 - DNA, 25 bp, synthetic construct
  source 1..25: mol_type = other DNA
gaagtaaagcggaactgaccctgta

SEQ ID NO: 486 - DNA, 25 bp, synthetic construct
  source 1..25: mol_type = other DNA
gaagtgaaacggaactgaccctgta

SEQ ID NO: 487 - DNA, 25 bp, synthetic construct
  source 1..25: mol_type = other DNA
gagatgaagcagaactgaccctgta

SEQ ID NO: 488 - DNA, 25 bp, synthetic construct
  source 1..25: mol_type = other DNA
gagatgaagcgaaactgaccctgta

SEQ ID NO: 489 - DNA, 25 bp, synthetic construct
  source 1..25: mol_type = other DNA
gagatgaagcggaactaaccctgta

SEQ ID NO: 490 - DNA, 25 bp, synthetic construct
  source 1..25: mol_type = other DNA
gagatgaagcggaactgaccctata

SEQ ID NO: 491 - DNA, 25 bp, synthetic construct
  source 1..25: mol_type = other DNA
gagataaagcggaactgaccctgta

SEQ ID NO: 492 - DNA, 25 bp, synthetic construct
  source 1..25: mol_type = other DNA
gagatgaaacggaactgaccctgta

SEQ ID NO: 493 - DNA, 25 bp, synthetic construct
  source 1..25: mol_type = other DNA
gaggtaaagcagaactgaccctgta

SEQ ID NO: 494 - DNA, 25 bp, synthetic construct
  source 1..25: mol_type = other DNA
gaggtaaagcgaaactgaccctgta

SEQ ID NO: 495 - DNA, 25 bp, synthetic construct
  source 1..25: mol_type = other DNA
gaggtaaagcggaactaaccctgta

SEQ ID NO: 496 - DNA, 25 bp, synthetic construct
  source 1..25: mol_type = other DNA
gaggtaaagcggaactgaccctata

SEQ ID NO: 497 - DNA, 25 bp, synthetic construct
  source 1..25: mol_type = other DNA
gaggtaaaacggaactgaccctgta

SEQ ID NO: 498 - DNA, 25 bp, synthetic construct
  source 1..25: mol_type = other DNA
gaggtgaaacagaactgaccctgta

SEQ ID NO: 499 - DNA, 25 bp, synthetic construct
  source 1..25: mol_type = other DNA
gaggtgaaacgaaactgaccctgta

SEQ ID NO: 500 - DNA, 25 bp, synthetic construct
  source 1..25: mol_type = other DNA
gaggtgaaacggaactaaccctgta

SEQ ID NO: 501 - DNA, 25 bp, synthetic construct
  source 1..25: mol_type = other DNA
gaggtgaaacggaactgaccctata

SEQ ID NO: 502 - DNA, 25 bp, synthetic construct
  source 1..25: mol_type = other DNA
gaggtgaagcggaactgaccctata

SEQ ID NO: 503 - DNA, 25 bp, synthetic construct
  source 1..25: mol_type = other DNA
tgaggtgaagcggaactgaccctgt

SEQ ID NO: 504 - DNA, 25 bp, synthetic construct
  source 1..25: mol_type = other DNA
ggaggtgaatcggaactgaccctgt

SEQ ID NO: 505 - DNA, 25 bp, synthetic construct
  source 1..25: mol_type = other DNA
ggaggtgaagtggaactgaccctgt

SEQ ID NO: 506 - DNA, 25 bp, synthetic construct
  source 1..25: mol_type = other DNA
ggaggtgaagctgaactgaccctgt

SEQ ID NO: 507 - DNA, 25 bp, synthetic construct
  source 1..25: mol_type = other DNA
ggaggtgaagcgtaactgaccctgt

SEQ ID NO: 508 - DNA, 25 bp, synthetic construct
  source 1..25: mol_type = other DNA
ggaggtgaagcggaattgaccctgt

SEQ ID NO: 509 - DNA, 25 bp, synthetic construct
  source 1..25: mol_type = other DNA
ggaggtgaagcggaacttaccctgt

SEQ ID NO: 510 - DNA, 25 bp, synthetic construct
  source 1..25: mol_type = other DNA
gtaggtgaagcggaactgaccctgt

SEQ ID NO: 511 - DNA, 25 bp, synthetic construct
  source 1..25: mol_type = other DNA
ggaggtgaagcggaactgatcctgt

SEQ ID NO: 512 - DNA, 25 bp, synthetic construct
  source 1..25: mol_type = other DNA
ggaggtgaagcggaactgactctgt

SEQ ID NO: 513 - DNA, 25 bp, synthetic construct
  source 1..25: mol_type = other DNA
ggaggtgaagcggaactgaccttgt

SEQ ID NO: 514 - DNA, 25 bp, synthetic construct
  source 1..25: mol_type = other DNA
ggaggtgaagcggaactgacccttt

SEQ ID NO: 515 - DNA, 25 bp, synthetic construct
  source 1..25: mol_type = other DNA
ggatgtgaagcggaactgaccctgt

SEQ ID NO: 516 - DNA, 25 bp, synthetic construct
  source 1..25: mol_type = other DNA
ggagttgaagcggaactgaccctgt

SEQ ID NO: 517 - DNA, 25 bp, synthetic construct
  source 1..25: mol_type = other DNA
ggaggttaagcggaactgaccctgt

SEQ ID NO: 518 - DNA, 25 bp, synthetic construct
  source 1..25: mol_type = other DNA
agaggtgaaacggaactgaccctgt

SEQ ID NO: 519 - DNA, 25 bp, synthetic construct
  source 1..25: mol_type = other DNA
agaggtgaagcagaactgaccctgt

SEQ ID NO: 520 - DNA, 25 bp, synthetic construct
  source 1..25: mol_type = other DNA
agaggtgaagcgaaactgaccctgt

SEQ ID NO: 521 - DNA, 25 bp, synthetic construct
  source 1..25: mol_type = other DNA
agaggtgaagcggaactaaccctgt

SEQ ID NO: 522 - DNA, 25 bp, synthetic construct
  source 1..25: mol_type = other DNA
aaaggtgaagcggaactgaccctgt

SEQ ID NO: 523 - DNA, 25 bp, synthetic construct
  source 1..25: mol_type = other DNA
agaggtgaagcggaactgaccctat

SEQ ID NO: 524 - DNA, 25 bp, synthetic construct
  source 1..25: mol_type = other DNA
agaagtgaagcggaactgaccctgt

SEQ ID NO: 525 - DNA, 25 bp, synthetic construct
  source 1..25: mol_type = other DNA
agagatgaagcggaactgaccctgt

SEQ ID NO: 526 - DNA, 25 bp, synthetic construct
  source 1..25: mol_type = other DNA
agaggtaaagcggaactgaccctgt

SEQ ID NO: 527 - DNA, 25 bp, synthetic construct
  source 1..25: mol_type = other DNA
ggaggtgaaacagaactgaccctgt

SEQ ID NO: 528 - DNA, 25 bp, synthetic construct
  source 1..25: mol_type = other DNA
ggaggtgaaacgaaactgaccctgt

SEQ ID NO: 529 - DNA, 25 bp, synthetic construct
  source 1..25: mol_type = other DNA
ggaggtgaaacggaactaaccctgt

SEQ ID NO: 530 - DNA, 25 bp, synthetic construct
  source 1..25: mol_type = other DNA
ggaggtgaaacggaactgaccctat

SEQ ID NO: 531 - DNA, 25 bp, synthetic construct
  source 1..25: mol_type = other DNA
ggaggtgaagcaaaactgaccctgt

SEQ ID NO: 532 - DNA, 25 bp, synthetic construct
  source 1..25: mol_type = other DNA
ggaggtgaagcagaactaaccctgt

SEQ ID NO: 533 - DNA, 25 bp, synthetic construct
  source 1..25: mol_type = other DNA
ggaggtgaagcagaactgaccctat

SEQ ID NO: 534 - DNA, 25 bp, synthetic construct
  source 1..25: mol_type = other DNA
ggaggtgaagcgaaactaaccctgt

SEQ ID NO: 535 - DNA, 25 bp, synthetic construct
  source 1..25: mol_type = other DNA
ggaggtgaagcgaaactgaccctat

SEQ ID NO: 536 - DNA, 25 bp, synthetic construct
  source 1..25: mol_type = other DNA
gaaggtgaaacggaactgaccctgt

SEQ ID NO: 537 - DNA, 25 bp, synthetic construct
  source 1..25: mol_type = other DNA
gaaggtgaagcagaactgaccctgt

SEQ ID NO: 538 - DNA, 25 bp, synthetic construct
  source 1..25: mol_type = other DNA
gaaggtgaagcgaaactgaccctgt

SEQ ID NO: 539 - DNA, 25 bp, synthetic construct
  source 1..25: mol_type = other DNA
gaaggtgaagcggaactaaccctgt

SEQ ID NO: 540 - DNA, 25 bp, synthetic construct
  source 1..25: mol_type = other DNA
gaaggtgaagcggaactgaccctat

SEQ ID NO: 541 - DNA, 25 bp, synthetic construct
  source 1..25: mol_type = other DNA
gaaagtgaagcggaactgaccctgt

SEQ ID NO: 542 - DNA, 25 bp, synthetic construct
  source 1..25: mol_type = other DNA
gaagatgaagcggaactgaccctgt

SEQ ID NO: 543 - DNA, 25 bp, synthetic construct
  source 1..25: mol_type = other DNA
gaaggtaaagcggaactgaccctgt

SEQ ID NO: 544 - DNA, 25 bp, synthetic construct
  source 1..25: mol_type = other DNA
ggaagtgaaacggaactgaccctgt

SEQ ID NO: 545 - DNA, 25 bp, synthetic construct
  source 1..25: mol_type = other DNA
ggaagtgaagcagaactgaccctgt

SEQ ID NO: 546 - DNA, 25 bp, synthetic construct
  source 1..25: mol_type = other DNA
ggaagtgaagcgaaactgaccctgt

SEQ ID NO: 547 - DNA, 25 bp, synthetic construct
  source 1..25: mol_type = other DNA
ggaagtgaagcggaactaaccctgt

SEQ ID NO: 548 - DNA, 25 bp, synthetic construct
  source 1..25: mol_type = other DNA
ggaagtgaagcggaactgaccctat

SEQ ID NO: 549 - DNA, 25 bp, synthetic construct
  source 1..25: mol_type = other DNA
ggaaatgaagcggaactgaccctgt

SEQ ID NO: 550 - DNA, 25 bp, synthetic construct
  source 1..25: mol_type = other DNA
ggaagtaaagcggaactgaccctgt

SEQ ID NO: 551 - DNA, 25 bp, synthetic construct
  source 1..25: mol_type = other DNA
ggagatgaaacggaactgaccctgt

SEQ ID NO: 552 - DNA, 25 bp, synthetic construct
  source 1..25: mol_type = other DNA
ggagatgaagcagaactgaccctgt

SEQ ID NO: 553 - DNA, 25 bp, synthetic construct
  source 1..25: mol_type = other DNA
ggagatgaagcgaaactgaccctgt

SEQ ID NO: 554 - DNA, 25 bp, synthetic construct
  source 1..25: mol_type = other DNA
ggagatgaagcggaactaaccctgt

SEQ ID NO: 555 - DNA, 25 bp, synthetic construct
  source 1..25: mol_type = other DNA
ggagatgaagcggaactgaccctat

SEQ ID NO: 556 - DNA, 25 bp, synthetic construct
  source 1..25: mol_type = other DNA
ggagataaagcggaactgaccctgt

SEQ ID NO: 557 - DNA, 25 bp, synthetic construct
  source 1..25: mol_type = other DNA
ggaggtaaaacggaactgaccctgt

SEQ ID NO: 558 - DNA, 25 bp, synthetic construct
  source 1..25: mol_type = other DNA
ggaggtaaagcagaactgaccctgt

SEQ ID NO: 559 - DNA, 25 bp, synthetic construct
  source 1..25: mol_type = other DNA
ggaggtaaagcgaaactgaccctgt

SEQ ID NO: 560 - DNA, 25 bp, synthetic construct
  source 1..25: mol_type = other DNA
ggaggtaaagcggaactaaccctgt

SEQ ID NO: 561 - DNA, 25 bp, synthetic construct
  source 1..25: mol_type = other DNA
ggaggtaaagcggaactgaccctat

SEQ ID NO: 562 - DNA, 25 bp, synthetic construct
  source 1..25: mol_type = other DNA
ggaggtgaagcggaactgaccctat

SEQ ID NO: 563 - DNA, 25 bp, synthetic construct
  source 1..25: mol_type = other DNA
aggaggtgaagcggaactgaccctg

SEQ ID NO: 564 - DNA, 25 bp, synthetic construct
  source 1..25: mol_type = other DNA
aggaggtgaatcggaactgaccctg

SEQ ID NO: 565 - DNA, 25 bp, synthetic construct
  source 1..25: mol_type = other DNA
aggaggtgaagtggaactgaccctg

SEQ ID NO: 566 - DNA, 25 bp, synthetic construct
  source 1..25: mol_type = other DNA
aggaggtgaagctgaactgaccctg

SEQ ID NO: 567 - DNA, 25 bp, synthetic construct
  source 1..25: mol_type = other DNA
aggaggtgaagcgtaactgaccctg

SEQ ID NO: 568 - DNA, 25 bp, synthetic construct
  source 1..25: mol_type = other DNA
aggaggtgaagcggaattgaccctg

SEQ ID NO: 569 - DNA, 25 bp, synthetic construct
  source 1..25: mol_type = other DNA
aggaggtgaagcggaacttaccctg

SEQ ID NO: 570 - DNA, 25 bp, synthetic construct
  source 1..25: mol_type = other DNA
atgaggtgaagcggaactgaccctg

SEQ ID NO: 571 - DNA, 25 bp, synthetic construct
  source 1..25: mol_type = other DNA
aggaggtgaagcggaactgatcctg

SEQ ID NO: 572 - DNA, 25 bp, synthetic construct
  source 1..25: mol_type = other DNA
aggaggtgaagcggaactgactctg

SEQ ID NO: 573 - DNA, 25 bp, synthetic construct
  source 1..25: mol_type = other DNA
aggaggtgaagcggaactgaccttg

SEQ ID NO: 574 - DNA, 25 bp, synthetic construct
  source 1..25: mol_type = other DNA
agtaggtgaagcggaactgaccctg

SEQ ID NO: 575 - DNA, 25 bp, synthetic construct
  source 1..25: mol_type = other DNA
aggatgtgaagcggaactgaccctg

SEQ ID NO: 576 - DNA, 25 bp, synthetic construct
  source 1..25: mol_type = other DNA
aggagttgaagcggaactgaccctg

SEQ ID NO: 577 - DNA, 25 bp, synthetic construct
  source 1..25: mol_type = other DNA
aggaggttaagcggaactgaccctg

SEQ ID NO: 578 - DNA, 25 bp, synthetic construct
  source 1..25: mol_type = other DNA
aggaggtgaaacagaactgaccctg

SEQ ID NO: 579 - DNA, 25 bp, synthetic construct
  source 1..25: mol_type = other DNA
aggaggtgaaacgaaactgaccctg

SEQ ID NO: 580 - DNA, 25 bp, synthetic construct
  source 1..25: mol_type = other DNA
aggaggtgaaacggaactaaccctg

SEQ ID NO: 581 - DNA, 25 bp, synthetic construct
  source 1..25: mol_type = other DNA
aggaggtgaaacggaactgacccta

SEQ ID NO: 582 - DNA, 25 bp, synthetic construct
  source 1..25: mol_type = other DNA
aggaggtgaagcaaaactgaccctg

SEQ ID NO: 583 - DNA, 25 bp, synthetic construct
  source 1..25: mol_type = other DNA
aggaggtgaagcagaactaaccctg

SEQ ID NO: 584 - DNA, 25 bp, synthetic construct
  source 1..25: mol_type = other DNA
aggaggtgaagcagaactgacccta

SEQ ID NO: 585 - DNA, 25 bp, synthetic construct
  source 1..25: mol_type = other DNA
aggaggtgaagcgaaactaaccctg

SEQ ID NO: 586 - DNA, 25 bp, synthetic construct
  source 1..25: mol_type = other DNA
aggaggtgaagcgaaactgacccta

SEQ ID NO: 587 - DNA, 25 bp, synthetic construct
  source 1..25: mol_type = other DNA
aagaggtgaaacggaactgaccctg

SEQ ID NO: 588 - DNA, 25 bp, synthetic construct
  source 1..25: mol_type = other DNA
aagaggtgaagcagaactgaccctg

SEQ ID NO: 589 - DNA, 25 bp, synthetic construct
  source 1..25: mol_type = other DNA
aagaggtgaagcgaaactgaccctg

SEQ ID NO: 590 - DNA, 25 bp, synthetic construct
  source 1..25: mol_type = other DNA
aagaggtgaagcggaactaaccctg

SEQ ID NO: 591 - DNA, 25 bp, synthetic construct
  source 1..25: mol_type = other DNA
aagaggtgaagcggaactgacccta

SEQ ID NO: 592 - DNA, 25 bp, synthetic construct
  source 1..25: mol_type = other DNA
aaaaggtgaagcggaactgaccctg

SEQ ID NO: 593 - DNA, 25 bp, synthetic construct
  source 1..25: mol_type = other DNA
aagaagtgaagcggaactgaccctg

SEQ ID NO: 594 - DNA, 25 bp, synthetic construct
  source 1..25: mol_type = other DNA
aagagatgaagcggaactgaccctg

SEQ ID NO: 595 - DNA, 25 bp, synthetic construct
  source 1..25: mol_type = other DNA
aagaggtaaagcggaactgaccctg

SEQ ID NO: 596 - DNA, 25 bp, synthetic construct
  source 1..25: mol_type = other DNA
agaaggtgaaacggaactgaccctg

SEQ ID NO: 597 - DNA, 25 bp, synthetic construct
  source 1..25: mol_type = other DNA
agaaggtgaagcagaactgaccctg

SEQ ID NO: 598 - DNA, 25 bp, synthetic construct
  source 1..25: mol_type = other DNA
agaaggtgaagcgaaactgaccctg

SEQ ID NO: 599 - DNA, 25 bp, synthetic construct
  source 1..25: mol_type = other DNA
agaaggtgaagcggaactaaccctg

SEQ ID NO: 600 - DNA, 25 bp, synthetic construct
  source 1..25: mol_type = other DNA
agaaggtgaagcggaactgacccta

SEQ ID NO: 601 - DNA, 25 bp, synthetic construct
  source 1..25: mol_type = other DNA
agaaagtgaagcggaactgaccctg

SEQ ID NO: 602 - DNA, 25 bp, synthetic construct
  source 1..25: mol_type = other DNA
agaagatgaagcggaactgaccctg

SEQ ID NO: 603 - DNA, 25 bp, synthetic construct
  source 1..25: mol_type = other DNA
agaaggtaaagcggaactgaccctg

SEQ ID NO: 604 - DNA, 25 bp, synthetic construct
  source 1..25: mol_type = other DNA
aggaagtgaaacggaactgaccctg

SEQ ID NO: 605 - DNA, 25 bp, synthetic construct
  source 1..25: mol_type = other DNA
aggaagtgaagcagaactgaccctg

SEQ ID NO: 606 - DNA, 25 bp, synthetic construct
  source 1..25: mol_type = other DNA
aggaagtgaagcgaaactgaccctg

SEQ ID NO: 607 - DNA, 25 bp, synthetic construct
  source 1..25: mol_type = other DNA
aggaagtgaagcggaactaaccctg

SEQ ID NO: 608 - DNA, 25 bp, synthetic construct
  source 1..25: mol_type = other DNA
aggaagtgaagcggaactgacccta

SEQ ID NO: 609 - DNA, 25 bp, synthetic construct
  source 1..25: mol_type = other DNA
aggaaatgaagcggaactgaccctg

SEQ ID NO: 610 - DNA, 25 bp, synthetic construct
  source 1..25: mol_type = other DNA
aggaagtaaagcggaactgaccctg

SEQ ID NO: 611 - DNA, 25 bp, synthetic construct
  source 1..25: mol_type = other DNA
aggagatgaaacggaactgaccctg

SEQ ID NO: 612 - DNA, 25 bp, synthetic construct
  source 1..25: mol_type = other DNA
aggagatgaagcagaactgaccctg

SEQ ID NO: 613 - DNA, 25 bp, synthetic construct
  source 1..25: mol_type = other DNA
aggagatgaagcgaaactgaccctg

SEQ ID NO: 614 - DNA, 25 bp, synthetic construct
  source 1..25: mol_type = other DNA
aggagatgaagcggaactaaccctg

SEQ ID NO: 615 - DNA, 25 bp, synthetic construct
  source 1..25: mol_type = other DNA
aggagatgaagcggaactgacccta

SEQ ID NO: 616 - DNA, 25 bp, synthetic construct
  source 1..25: mol_type = other DNA
aggagataaagcggaactgaccctg

SEQ ID NO: 617 - DNA, 25 bp, synthetic construct
  source 1..25: mol_type = other DNA
aggaggtaaaacggaactgaccctg

SEQ ID NO: 618 - DNA, 25 bp, synthetic construct
  source 1..25: mol_type = other DNA
aggaggtaaagcagaactgaccctg

SEQ ID NO: 619 - DNA, 25 bp, synthetic construct
  source 1..25: mol_type = other DNA
aggaggtaaagcgaaactgaccctg

SEQ ID NO: 620 - DNA, 25 bp, synthetic construct
  source 1..25: mol_type = other DNA
aggaggtaaagcggaactaaccctg

SEQ ID NO: 621 - DNA, 25 bp, synthetic construct
  source 1..25: mol_type = other DNA
aggaggtaaagcggaactgacccta

SEQ ID NO: 622 - DNA, 25 bp, synthetic construct
  source 1..25: mol_type = other DNA
aggaggtgaagcggaactgacccta

SEQ ID NO: 623 - DNA, 25 bp, synthetic construct
  source 1..25: mol_type = other DNA
aaggaggtgaatcggaactgaccct

SEQ ID NO: 624 - DNA, 25 bp, synthetic construct
  source 1..25: mol_type = other DNA
aaggaggtgaagtggaactgaccct

SEQ ID NO: 625 - DNA, 25 bp, synthetic construct
  source 1..25: mol_type = other DNA
aaggaggtgaagctgaactgaccct

SEQ ID NO: 626 - DNA, 25 bp, synthetic construct
  source 1..25: mol_type = other DNA
aaggaggtgaagcgtaactgaccct

SEQ ID NO: 627 - DNA, 25 bp, synthetic construct
  source 1..25: mol_type = other DNA
aaggaggtgaagcggaattgaccct

SEQ ID NO: 628 - DNA, 25 bp, synthetic construct
  source 1..25: mol_type = other DNA
aaggaggtgaagcggaacttaccct

SEQ ID NO: 629 - DNA, 25 bp, synthetic construct
  source 1..25: mol_type = other DNA
aaggaggtgaagcggaactgatcct

SEQ ID NO: 630 - DNA, 25 bp, synthetic construct
  source 1..25: mol_type = other DNA
aaggaggtgaagcggaactgactct

SEQ ID NO: 631 - DNA, 25 bp, synthetic construct
  source 1..25: mol_type = other DNA
aaggaggtgaagcggaactgacctt

SEQ ID NO: 632 - DNA, 25 bp, synthetic construct
  source 1..25: mol_type = other DNA
aatgaggtgaagcggaactgaccct

SEQ ID NO: 633 - DNA, 25 bp, synthetic construct
  source 1..25: mol_type = other DNA
aagtaggtgaagcggaactgaccct

SEQ ID NO: 634 - DNA, 25 bp, synthetic construct
  source 1..25: mol_type = other DNA
aaggatgtgaagcggaactgaccct

SEQ ID NO: 635 - DNA, 25 bp, synthetic construct
  source 1..25: mol_type = other DNA
aaggagttgaagcggaactgaccct

SEQ ID NO: 636 - DNA, 25 bp, synthetic construct
  source 1..25: mol_type = other DNA
aaggaggttaagcggaactgaccct

SEQ ID NO: 637 - DNA, 25 bp, synthetic construct
  source 1..25: mol_type = other DNA
aaggaggtgaagcggaactaaccct

SEQ ID NO: 638 - DNA, 25 bp, synthetic construct
  source 1..25: mol_type = other DNA
aaggaggtgaagcgaaactaaccct

SEQ ID NO: 639 - DNA, 25 bp, synthetic construct
  source 1..25: mol_type = other DNA
aaaggaggtgaagcggaactgaccc

SEQ ID NO: 640 - DNA, 25 bp, synthetic construct
  source 1..25: mol_type = other DNA
aaaggaggttaagcggaactgaccc

SEQ ID NO: 641 - DNA, 25 bp, synthetic construct
  source 1..25: mol_type = other DNA
aaaggaggtgaatcggaactgaccc

SEQ ID NO: 642 - DNA, 25 bp, synthetic construct
  source 1..25: mol_type = other DNA
aaaggaggtgaagtggaactgaccc

SEQ ID NO: 643 - DNA, 25 bp, synthetic construct
  source 1..25: mol_type = other DNA
aaaggaggtgaagctgaactgaccc

SEQ ID NO: 644 - DNA, 25 bp, synthetic construct
  source 1..25: mol_type = other DNA
aaaggaggtgaagcgtaactgaccc

SEQ ID NO: 645 - DNA, 25 bp, synthetic construct
  source 1..25: mol_type = other DNA
aaaggaggtgaagcggaattgaccc

SEQ ID NO: 646 - DNA, 25 bp, synthetic construct
  source 1..25: mol_type = other DNA
aaaggaggtgaagcggaacttaccc

SEQ ID NO: 647 - DNA, 25 bp, synthetic construct
  source 1..25: mol_type = other DNA
aaaggaggtgaagcggaactgatcc

SEQ ID NO: 648 - DNA, 25 bp, synthetic construct
  source 1..25: mol_type = other DNA
aaaggaggtgaagcggaactgactc

SEQ ID NO: 649 - DNA, 25 bp, synthetic construct
  source 1..25: mol_type = other DNA
aaaggaggtgaagcggaactgacct

SEQ ID NO: 650 - DNA, 25 bp, synthetic construct
  source 1..25: mol_type = other DNA
aaatgaggtgaagcggaactgaccc

SEQ ID NO: 651 - DNA, 25 bp, synthetic construct
  source 1..25: mol_type = other DNA
aaagtaggtgaagcggaactgaccc

SEQ ID NO: 652 - DNA, 25 bp, synthetic construct
  source 1..25: mol_type = other DNA
aaaggatgtgaagcggaactgaccc

SEQ ID NO: 653 - DNA, 25 bp, synthetic construct
  source 1..25: mol_type = other DNA
aaaggagttgaagcggaactgaccc

SEQ ID NO: 654 - DNA, 25 bp, synthetic construct
  source 1..25: mol_type = other DNA
aaaggaggtgaagcggaactaaccc

SEQ ID NO: 655 - DNA, 25 bp, synthetic construct
  source 1..25: mol_type = other DNA
aaaggaggtgaagcgaaactaaccc

SEQ ID NO: 656 - DNA, 25 bp, synthetic construct
  source 1..25: mol_type = other DNA
aaaaggaggtgaagcggaactgacc

SEQ ID NO: 657 - DNA, 25 bp, synthetic construct
  source 1..25: mol_type = other DNA
aaaaggaggttaagcggaactgacc

SEQ ID NO: 658 - DNA, 25 bp, synthetic construct
  source 1..25: mol_type = other DNA
aaaaggaggtgaatcggaactgacc

SEQ ID NO: 659 - DNA, 25 bp, synthetic construct
  source 1..25: mol_type = other DNA
aaaaggaggtgaagtggaactgacc

SEQ ID NO: 660 - DNA, 25 bp, synthetic construct
  source 1..25: mol_type = other DNA
aaaaggaggtgaagctgaactgacc

SEQ ID NO: 661 - DNA, 25 bp, synthetic construct
  source 1..25: mol_type = other DNA
aaaaggaggtgaagcgtaactgacc

SEQ ID NO: 662 - DNA, 25 bp, synthetic construct
  source 1..25: mol_type = other DNA
aaaaggaggtgaagcggaattgacc

SEQ ID NO: 663 - DNA, 25 bp, synthetic construct
  source 1..25: mol_type = other DNA
aaaaggaggtgaagcggaacttacc

SEQ ID NO: 664 - DNA, 25 bp, synthetic construct
  source 1..25: mol_type = other DNA
aaaaggaggtgaagcggaactgatc

SEQ ID NO: 665 - DNA, 25 bp, synthetic construct
  source 1..25: mol_type = other DNA
aaaaggaggtgaagcggaactgact

SEQ ID NO: 666 - DNA, 25 bp, synthetic construct
  source 1..25: mol_type = other DNA
aaaatgaggtgaagcggaactgacc

SEQ ID NO: 667 - DNA, 25 bp, synthetic construct
  source 1..25: mol_type = other DNA
aaaagtaggtgaagcggaactgacc

SEQ ID NO: 668 - DNA, 25 bp, synthetic construct
  source 1..25: mol_type = other DNA
aaaaggatgtgaagcggaactgacc

SEQ ID NO: 669 - DNA, 25 bp, synthetic construct
  source 1..25: mol_type = other DNA
aaaaggagttgaagcggaactgacc

SEQ ID NO: 670 - DNA, 25 bp, synthetic construct
  source 1..25: mol_type = other DNA
aaaaggaggtgaagcggaactaacc

SEQ ID NO: 671 - DNA, 25 bp, synthetic construct
  source 1..25: mol_type = other DNA
aaaaggaggtgaagcgaaactaacc

SEQ ID NO: 672 - DNA, 25 bp, synthetic construct
  source 1..25: mol_type = other DNA
taaaaggaggtgaagcggaactgac

SEQ ID NO: 673 - DNA, 25 bp, synthetic construct
  source 1..25: mol_type = other DNA
caaaaggagttgaagcggaactgac

SEQ ID NO: 674 - DNA, 25 bp, synthetic construct
  source 1..25: mol_type = other DNA
caaaaggaggttaagcggaactgac

SEQ ID NO: 675 - DNA, 25 bp, synthetic construct
  source 1..25: mol_type = other DNA
caaaaggaggtgaatcggaactgac

SEQ ID NO: 676 - DNA, 25 bp, synthetic construct
  source 1..25: mol_type = other DNA
caaaaggaggtgaagtggaactgac

SEQ ID NO: 677 - DNA, 25 bp, synthetic construct
  source 1..25: mol_type = other DNA
caaaaggaggtgaagctgaactgac

SEQ ID NO: 678 - DNA, 25 bp, synthetic construct
  source 1..25: mol_type = other DNA
caaaaggaggtgaagcgtaactgac

SEQ ID NO: 679 - DNA, 25 bp, synthetic construct
  source 1..25: mol_type = other DNA
caaaaggaggtgaagcggaattgac

SEQ ID NO: 680 - DNA, 25 bp, synthetic construct
  source 1..25: mol_type = other DNA
caaaaggaggtgaagcggaacttac

SEQ ID NO: 681 - DNA, 25 bp, synthetic construct
  source 1..25: mol_type = other DNA
caaaaggaggtgaagcggaactgat

SEQ ID NO: 682 - DNA, 25 bp, synthetic construct
  source 1..25: mol_type = other DNA
caaaatgaggtgaagcggaactgac

SEQ ID NO: 683 - DNA, 25 bp, synthetic construct
  source 1..25: mol_type = other DNA
caaaagtaggtgaagcggaactgac

SEQ ID NO: 684 - DNA, 25 bp, synthetic construct
  source 1..25: mol_type = other DNA
caaaaggatgtgaagcggaactgac

SEQ ID NO: 685 - DNA, 25 bp, synthetic construct
  source 1..25: mol_type = other DNA
caaaaggaggtgaagcggaactaac

SEQ ID NO: 686 - DNA, 25 bp, synthetic construct
  source 1..25: mol_type = other DNA
caaaaggaggtgaagcgaaactaac

SEQ ID NO: 687 - DNA, 25 bp, synthetic construct
  source 1..25: mol_type = other DNA
acaaaaggaggtgaagcggaactga

SEQ ID NO: 688 - DNA, 25 bp, synthetic construct
  source 1..25: mol_type = other DNA
acaaaaggatgtgaagcggaactga

SEQ ID NO: 689 - DNA, 25 bp, synthetic construct
  source 1..25: mol_type = other DNA
acaaaaggagttgaagcggaactga

SEQ ID NO: 690 - DNA, 25 bp, synthetic construct
  source 1..25: mol_type = other DNA
acaaaaggaggttaagcggaactga

SEQ ID NO: 691 - DNA, 25 bp, synthetic construct
  source 1..25: mol_type = other DNA
acaaaaggaggtgaatcggaactga

SEQ ID NO: 692 - DNA, 25 bp, synthetic construct
  source 1..25: mol_type = other DNA
acaaaaggaggtgaagtggaactga

SEQ ID NO: 693 - DNA, 25 bp, synthetic construct
  source 1..25: mol_type = other DNA
acaaaaggaggtgaagctgaactga

SEQ ID NO: 694 - DNA, 25 bp, synthetic construct
  source 1..25: mol_type = other DNA
acaaaaggaggtgaagcgtaactga

SEQ ID NO: 695 - DNA, 25 bp, synthetic construct
  source 1..25: mol_type = other DNA
ataaaaggaggtgaagcggaactga

SEQ ID NO: 696 - DNA, 25 bp, synthetic construct
  source 1..25: mol_type = other DNA
acaaaaggaggtgaagcggaattga

SEQ ID NO: 697 - DNA, 25 bp, synthetic construct
  source 1..25: mol_type = other DNA
acaaaaggaggtgaagcggaactta

SEQ ID NO: 698 - DNA, 25 bp, synthetic construct
  source 1..25: mol_type = other DNA
acaaaatgaggtgaagcggaactga

SEQ ID NO: 699 - DNA, 25 bp, synthetic construct
  source 1..25: mol_type = other DNA
acaaaagtaggtgaagcggaactga

SEQ ID NO: 700 - DNA, 25 bp, synthetic construct
  source 1..25: mol_type = other DNA
acaaaaggaggtgaagcggaactaa

SEQ ID NO: 701 - DNA, 25 bp, synthetic construct
  source 1..25: mol_type = other DNA
acaaaaggaggtgaagcgaaactaa

SEQ ID NO: 702 - DNA, 25 bp, synthetic construct
  source 1..25: mol_type = other DNA
tacaaaaggaggtgaagcggaactg

SEQ ID NO: 703 - DNA, 25 bp, synthetic construct
  source 1..25: mol_type = other DNA
tacaaaaggatgtgaagcggaactg

SEQ ID NO: 704 - DNA, 25 bp, synthetic construct
  source 1..25: mol_type = other DNA
tacaaaaggagttgaagcggaactg

SEQ ID NO: 705 - DNA, 25 bp, synthetic construct
  source 1..25: mol_type = other DNA
tacaaaaggaggttaagcggaactg

SEQ ID NO: 706 - DNA, 25 bp, synthetic construct
  source 1..25: mol_type = other DNA
tacaaaaggaggtgaatcggaactg

SEQ ID NO: 707 - DNA, 25 bp, synthetic construct
  source 1..25: mol_type = other DNA
tacaaaaggaggtgaagtggaactg

SEQ ID NO: 708 - DNA, 25 bp, synthetic construct
  source 1..25: mol_type = other DNA
tacaaaaggaggtgaagctgaactg

SEQ ID NO: 709 - DNA, 25 bp, synthetic construct
  source 1..25: mol_type = other DNA
tacaaaaggaggtgaagcgtaactg

SEQ ID NO: 710 - DNA, 25 bp, synthetic construct
  source 1..25: mol_type = other DNA
tacaaaaggaggtgaagcggaattg

SEQ ID NO: 711 - DNA, 25 bp, synthetic construct
  source 1..25: mol_type = other DNA
tataaaaggaggtgaagcggaactg

SEQ ID NO: 712 - DNA, 25 bp, synthetic construct
  source 1..25: mol_type = other DNA
tacaaaatgaggtgaagcggaactg

SEQ ID NO: 713 - DNA, 25 bp, synthetic construct
  source 1..25: mol_type = other DNA
tacaaaagtaggtgaagcggaactg

SEQ ID NO: 714 - DNA, 25 bp, synthetic construct
  source 1..25: mol_type = other DNA
tacaaaaggaggtgaagcggaacta

SEQ ID NO: 715 - DNA, 25 bp, synthetic construct
  source 1..25: mol_type = other DNA
tacaaaaggaggtgaagcgaaacta

SEQ ID NO: 716 - DNA, 25 bp, synthetic construct
  source 1..25: mol_type = other DNA
atacaaaagtaggtgaagcggaact

SEQ ID NO: 717 - DNA, 25 bp, synthetic construct
  source 1..25: mol_type = other DNA
atacaaaaggatgtgaagcggaact

SEQ ID NO: 718 - DNA, 25 bp, synthetic construct
  source 1..25: mol_type = other DNA
atacaaaaggagttgaagcggaact

SEQ ID NO: 719 - DNA, 25 bp, synthetic construct
  source 1..25: mol_type = other DNA
atacaaaaggaggttaagcggaact

SEQ ID NO: 720 - DNA, 25 bp, synthetic construct
  source 1..25: mol_type = other DNA
atacaaaaggaggtgaatcggaact

SEQ ID NO: 721 - DNA, 25 bp, synthetic construct
  source 1..25: mol_type = other DNA
atacaaaaggaggtgaagtggaact

SEQ ID NO: 722 - DNA, 25 bp, synthetic construct
  source 1..25: mol_type = other DNA
atacaaaaggaggtgaagctgaact

SEQ ID NO: 723 - DNA, 25 bp, synthetic construct
  source 1..25: mol_type = other DNA
atacaaaaggaggtgaagcgtaact

SEQ ID NO: 724 - DNA, 25 bp, synthetic construct
  source 1..25: mol_type = other DNA
atacaaaaggaggtgaagcggaatt

SEQ ID NO: 725 - DNA, 25 bp, synthetic construct
  source 1..25: mol_type = other DNA
atataaaaggaggtgaagcggaact

SEQ ID NO: 726 - DNA, 25 bp, synthetic construct
  source 1..25: mol_type = other DNA
atacaaaatgaggtgaagcggaact

SEQ ID NO: 727 - DNA, 25 bp, synthetic construct
  source 1..25: mol_type = other DNA
atacaaaaggaggtgaaacgaaact

SEQ ID NO: 728 - DNA, 25 bp, synthetic construct
  source 1..25: mol_type = other DNA
atacaaaaggaggtgaagcgaaact

SEQ ID NO: 729 - DNA, 25 bp, synthetic construct
  source 1..25: mol_type = other DNA
atacaaaaggaggtgaagcaaaact

SEQ ID NO: 730 - DNA, 18 bp, synthetic construct
  source 1..18: mol_type = other DNA
taaaaacccaaatttaac

SEQ ID NO: 731 - DNA, 18 bp, synthetic construct
  source 1..18: mol_type = other DNA
taaaaacccaaattgaat

SEQ ID NO: 732 - DNA, 18 bp, synthetic construct
  source 1..18: mol_type = other DNA
taaaaatccaaattgaac

SEQ ID NO: 733 - DNA, 18 bp, synthetic construct
  source 1..18: mol_type = other DNA
taaaaactcaaattgaac

SEQ ID NO: 734 - DNA, 18 bp, synthetic construct
  source 1..18: mol_type = other DNA
taaaaacctaaattgaac

SEQ ID NO: 735 - DNA, 18 bp, synthetic construct
  source 1..18: mol_type = other DNA
ttaaaaacctaaattgaa

SEQ ID NO: 736 - DNA, 18 bp, synthetic construct
  source 1..18: mol_type = other DNA
ttaaaaacccaaatttaa

SEQ ID NO: 737 - DNA, 18 bp, synthetic construct
  source 1..18: mol_type = other DNA
ttaaaaatccaaattgaa

SEQ ID NO: 738 - DNA, 18 bp, synthetic construct
  source 1..18: mol_type = other DNA
ttaaaaactcaaattgaa

SEQ ID NO: 739 - DNA, 18 bp, synthetic construct
  source 1..18: mol_type = other DNA
tttaaaaacccaaattga

SEQ ID NO: 740 - DNA, 18 bp, synthetic construct
  source 1..18: mol_type = other DNA
gttaaaaactcaaattga

SEQ ID NO: 741 - DNA, 18 bp, synthetic construct
  source 1..18: mol_type = other DNA
gttaaaaacctaaattga

SEQ ID NO: 742 - DNA, 18 bp, synthetic construct
  source 1..18: mol_type = other DNA
gttaaaaacccaaattta

SEQ ID NO: 743 - DNA, 18 bp, synthetic construct
  source 1..18: mol_type = other DNA
gttaaaaatccaaattga

SEQ ID NO: 744 - DNA, 18 bp, synthetic construct
  source 1..18: mol_type = other DNA
agttaaaaatccaaattg

SEQ ID NO: 745 - DNA, 18 bp, synthetic construct
  source 1..18: mol_type = other DNA
agttaaaaactcaaattg

SEQ ID NO: 746 - DNA, 18 bp, synthetic construct
  source 1..18: mol_type = other DNA
agttaaaaacctaaattg

SEQ ID NO: 747 - DNA, 18 bp, synthetic construct
  source 1..18: mol_type = other DNA
agttaaaaacccaaattt

SEQ ID NO: 748 - DNA, 18 bp, synthetic construct
  source 1..18: mol_type = other DNA
atttaaaaacccaaattg

SEQ ID NO: 749 - DNA, 18 bp, synthetic construct
  source 1..18: mol_type = other DNA
aagttaaaaatccaaatt

SEQ ID NO: 750 - DNA, 18 bp, synthetic construct
  source 1..18: mol_type = other DNA
aagttaaaaactcaaatt

SEQ ID NO: 751 - DNA, 18 bp, synthetic construct
  source 1..18: mol_type = other DNA
aagttaaaaacctaaatt

SEQ ID NO: 752 - DNA, 18 bp, synthetic construct
  source 1..18: mol_type = other DNA
aatttaaaaacccaaatt

SEQ ID NO: 753 - DNA, 18 bp, synthetic construct
  source 1..18: mol_type = other DNA
aaagttaaaaatccaaat

SEQ ID NO: 754 - DNA, 18 bp, synthetic construct
  source 1..18: mol_type = other DNA
aaagttaaaaactcaaat

SEQ ID NO: 755 - DNA, 18 bp, synthetic construct
  source 1..18: mol_type = other DNA
aaagttaaaaacctaaat

SEQ ID NO: 756 - DNA, 18 bp, synthetic construct
  source 1..18: mol_type = other DNA
aaatttaaaaacccaaat

SEQ ID NO: 757 - DNA, 18 bp, synthetic construct
  source 1..18: mol_type = other DNA
taaagttaaaaatccaaa

SEQ ID NO: 758 - DNA, 18 bp, synthetic construct
  source 1..18: mol_type = other DNA
taaagttaaaaactcaaa

SEQ ID NO: 759 - DNA, 18 bp, synthetic construct
  source 1..18: mol_type = other DNA
taaagttaaaaacctaaa

SEQ ID NO: 760 - DNA, 18 bp, synthetic construct
  source 1..18: mol_type = other DNA
taaatttaaaaacccaaa

SEQ ID NO: 761 - DNA, 18 bp, synthetic construct
  source 1..18: mol_type = other DNA
ttaaagttaaaaacccaa

SEQ ID NO: 762 - DNA, 18 bp, synthetic construct
  source 1..18: mol_type = other DNA
gtaaagttaaaaatccaa

SEQ ID NO: 763 - DNA, 18 bp, synthetic construct
  source 1..18: mol_type = other DNA
gtaaagttaaaaactcaa

SEQ ID NO: 764 - DNA, 18 bp, synthetic construct
  source 1..18: mol_type = other DNA
gtaaagttaaaaacctaa

SEQ ID NO: 765 - DNA, 18 bp, synthetic construct
  source 1..18: mol_type = other DNA
gtaaatttaaaaacccaa

SEQ ID NO: 766 - DNA, 18 bp, synthetic construct
  source 1..18: mol_type = other DNA
tgtaaagttaaaaatcca

SEQ ID NO: 767 - DNA, 18 bp, synthetic construct
  source 1..18: mol_type = other DNA
tgtaaagttaaaaactca

SEQ ID NO: 768 - DNA, 18 bp, synthetic construct
  source 1..18: mol_type = other DNA
tgtaaagttaaaaaccta

SEQ ID NO: 769 - DNA, 18 bp, synthetic construct
  source 1..18: mol_type = other DNA
tttaaagttaaaaaccca

SEQ ID NO: 770 - DNA, 18 bp, synthetic construct
  source 1..18: mol_type = other DNA
tgtaaatttaaaaaccca

SEQ ID NO: 771 - DNA, 18 bp, synthetic construct
  source 1..18: mol_type = other DNA
ttgtaaagttaaaaaccc

SEQ ID NO: 772 - DNA, 18 bp, synthetic construct
  source 1..18: mol_type = other DNA
ctgtaaagttaaaaatcc

SEQ ID NO: 773 - DNA, 18 bp, synthetic construct
  source 1..18: mol_type = other DNA
ctgtaaagttaaaaactc

SEQ ID NO: 774 - DNA, 18 bp, synthetic construct
  source 1..18: mol_type = other DNA
ctgtaaagttaaaaacct

SEQ ID NO: 775 - DNA, 18 bp, synthetic construct
  source 1..18: mol_type = other DNA
ctttaaagttaaaaaccc

SEQ ID NO: 776 - DNA, 18 bp, synthetic construct
  source 1..18: mol_type = other DNA
ctgtaaatttaaaaaccc

SEQ ID NO: 777 - DNA, 18 bp, synthetic construct
  source 1..18: mol_type = other DNA
tctgtaaagttaaaaacc

SEQ ID NO: 778 - DNA, 18 bp, synthetic construct
  source 1..18: mol_type = other DNA
cctgtaaagttaaaaatc

SEQ ID NO: 779 - DNA, 18 bp, synthetic construct
  source 1..18: mol_type = other DNA
cctgtaaagttaaaaact

SEQ ID NO: 780 - DNA, 18 bp, synthetic construct
  source 1..18: mol_type = other DNA
cttgtaaagttaaaaacc

SEQ ID NO: 781 - DNA, 18 bp, synthetic construct
  source 1..18: mol_type = other DNA
cctttaaagttaaaaacc

SEQ ID NO: 782 - DNA, 18 bp, synthetic construct
  source 1..18: mol_type = other DNA
cctgtaaatttaaaaacc

SEQ ID NO: 783 - DNA, 18 bp, synthetic construct
  source 1..18: mol_type = other DNA
tcctgtaaagttaaaaac

SEQ ID NO: 784 - DNA, 18 bp, synthetic construct
  source 1..18: mol_type = other DNA
ccctgtaaatttaaaaac

SEQ ID NO: 785 - DNA, 18 bp, synthetic construct
  source 1..18: mol_type = other DNA
ccctgtaaagttaaaaat

SEQ ID NO: 786 - DNA, 18 bp, synthetic construct
  source 1..18: mol_type = other DNA
ctctgtaaagttaaaaac

SEQ ID NO: 787 - DNA, 18 bp, synthetic construct
  source 1..18: mol_type = other DNA
ccttgtaaagttaaaaac

SEQ ID NO: 788 - DNA, 18 bp, synthetic construct
  source 1..18: mol_type = other DNA
ccctttaaagttaaaaac

SEQ ID NO: 789 - DNA, 18 bp, synthetic construct
  source 1..18: mol_type = other DNA
accctgtaaatttaaaaa

SEQ ID NO: 790 - DNA, 18 bp, synthetic construct
  source 1..18: mol_type = other DNA
atcctgtaaagttaaaaa

SEQ ID NO: 791 - DNA, 18 bp, synthetic construct
  source 1..18: mol_type = other DNA
actctgtaaagttaaaaa

SEQ ID NO: 792 - DNA, 18 bp, synthetic construct
  source 1..18: mol_type = other DNA
accttgtaaagttaaaaa

SEQ ID NO: 793 - DNA, 18 bp, synthetic construct
  source 1..18: mol_type = other DNA
accctttaaagttaaaaa

SEQ ID NO: 794 - DNA, 18 bp, synthetic construct
  source 1..18: mol_type = other DNA
taccctgtaaagttaaaa

SEQ ID NO: 795 - DNA, 18 bp, synthetic construct
  source 1..18: mol_type = other DNA
gaccctgtaaatttaaaa

SEQ ID NO: 796 - DNA, 18 bp, synthetic construct
  source 1..18: mol_type = other DNA
gatcctgtaaagttaaaa

SEQ ID NO: 797 - DNA, 18 bp, synthetic construct
  source 1..18: mol_type = other DNA
gactctgtaaagttaaaa

SEQ ID NO: 798 - DNA, 18 bp, synthetic construct
  source 1..18: mol_type = other DNA
gaccttgtaaagttaaaa

SEQ ID NO: 799 - DNA, 18 bp, synthetic construct
  source 1..18: mol_type = other DNA
gaccctttaaagttaaaa

SEQ ID NO: 800 - DNA, 18 bp, synthetic construct
  source 1..18: mol_type = other DNA
tgaccctgtaaagttaaa

SEQ ID NO: 801 - DNA, 18 bp, synthetic construct
  source 1..18: mol_type = other DNA
tgaccctgtaaatttaaa

SEQ ID NO: 802 - DNA, 18 bp, synthetic construct
  source 1..18: mol_type = other DNA
ttaccctgtaaagttaaa

SEQ ID NO: 803 - DNA, 18 bp, synthetic construct
  source 1..18: mol_type = other DNA
tgatcctgtaaagttaaa

SEQ ID NO: 804 - DNA, 18 bp, synthetic construct
  source 1..18: mol_type = other DNA
tgactctgtaaagttaaa

SEQ ID NO: 805 - DNA, 18 bp, synthetic construct
  source 1..18: mol_type = other DNA
tgaccttgtaaagttaaa

SEQ ID NO: 806 - DNA, 18 bp, synthetic construct
  source 1..18: mol_type = other DNA
tgaccctttaaagttaaa

SEQ ID NO: 807 - DNA, 18 bp, synthetic construct
  source 1..18: mol_type = other DNA
tgaccctgtaaaattaaa

SEQ ID NO: 808 - DNA, 18 bp, synthetic construct
  source 1..18: mol_type = other DNA
ctgaccctgtaaagttaa

SEQ ID NO: 809 - DNA, 18 bp, synthetic construct
  source 1..18: mol_type = other DNA
ttgaccctgtaaagttaa

SEQ ID NO: 810 - DNA, 18 bp, synthetic construct
  source 1..18: mol_type = other DNA
ctgaccctgtaaatttaa

SEQ ID NO: 811 - DNA, 18 bp, synthetic construct
  source 1..18: mol_type = other DNA
cttaccctgtaaagttaa

SEQ ID NO: 812 - DNA, 18 bp, synthetic construct
  source 1..18: mol_type = other DNA
ctgatcctgtaaagttaa

SEQ ID NO: 813 - DNA, 18 bp, synthetic construct
  source 1..18: mol_type = other DNA
ctgactctgtaaagttaa

SEQ ID NO: 814 - DNA, 18 bp, synthetic construct
  source 1..18: mol_type = other DNA
ctgaccttgtaaagttaa

SEQ ID NO: 815 - DNA, 18 bp, synthetic construct
  source 1..18: mol_type = other DNA
ctgaccctttaaagttaa

SEQ ID NO: 816 - DNA, 18 bp, synthetic construct
  source 1..18: mol_type = other DNA
ctgaccctgtaaaattaa

SEQ ID NO: 817 - DNA, 18 bp, synthetic construct
  source 1..18: mol_type = other DNA
actgaccctgtaaagtta

SEQ ID NO: 818 - DNA, 18 bp, synthetic construct
  source 1..18: mol_type = other DNA
actgaccctttaaagtta

SEQ ID NO: 819 - DNA, 18 bp, synthetic construct
  source 1..18: mol_type = other DNA
actgaccctgtaaattta

SEQ ID NO: 820 - DNA, 18 bp, synthetic construct
  source 1..18: mol_type = other DNA
attgaccctgtaaagtta

SEQ ID NO: 821 - DNA, 18 bp, synthetic construct
  source 1..18: mol_type = other DNA
acttaccctgtaaagtta

SEQ ID NO: 822 - DNA, 18 bp, synthetic construct
  source 1..18: mol_type = other DNA
actgatcctgtaaagtta

SEQ ID NO: 823 - DNA, 18 bp, synthetic construct
  source 1..18: mol_type = other DNA
actgactctgtaaagtta

SEQ ID NO: 824 - DNA, 18 bp, synthetic construct
  source 1..18: mol_type = other DNA
actgaccttgtaaagtta

SEQ ID NO: 825 - DNA, 18 bp, synthetic construct
  source 1..18: mol_type = other DNA
actgaccctgtaaaatta

SEQ ID NO: 826 - DNA, 18 bp, synthetic construct
  source 1..18: mol_type = other DNA
aactgaccctgtaaagtt

SEQ ID NO: 827 - DNA, 18 bp, synthetic construct
  source 1..18: mol_type = other DNA
aactgaccctttaaagtt

SEQ ID NO: 828 - DNA, 18 bp, synthetic construct
  source 1..18: mol_type = other DNA
aactgaccctgtaaattt

SEQ ID NO: 829 - DNA, 18 bp, synthetic construct
  source 1..18: mol_type = other DNA
aattgaccctgtaaagtt

SEQ ID NO: 830 - DNA, 18 bp, synthetic construct
  source 1..18: mol_type = other DNA
aacttaccctgtaaagtt

SEQ ID NO: 831 - DNA, 18 bp, synthetic construct
  source 1..18: mol_type = other DNA
aactgatcctgtaaagtt

SEQ ID NO: 832 - DNA, 18 bp, synthetic construct
  source 1..18: mol_type = other DNA
aactgactctgtaaagtt

SEQ ID NO: 833 - DNA, 18 bp, synthetic construct
  source 1..18: mol_type = other DNA
aactgaccttgtaaagtt

SEQ ID NO: 834 - DNA, 18 bp, synthetic construct
  source 1..18: mol_type = other DNA
aactgaccctgtaaaatt

SEQ ID NO: 835 - DNA, 18 bp, synthetic construct
  source 1..18: mol_type = other DNA
gaactgaccctgtaaagt

SEQ ID NO: 836 - DNA, 18 bp, synthetic construct
  source 1..18: mol_type = other DNA
taactgaccctgtaaagt

SEQ ID NO: 837 - DNA, 18 bp, synthetic construct
  source 1..18: mol_type = other DNA
gaactgaccttgtaaagt

SEQ ID NO: 838 - DNA, 18 bp, synthetic construct
  source 1..18: mol_type = other DNA
gaactgaccctttaaagt

SEQ ID NO: 839 - DNA, 18 bp, synthetic construct
  source 1..18: mol_type = other DNA
gaactgaccctgtaaatt

SEQ ID NO: 840 - DNA, 18 bp, synthetic construct
  source 1..18: mol_type = other DNA
gaattgaccctgtaaagt

SEQ ID NO: 841 - DNA, 18 bp, synthetic construct
  source 1..18: mol_type = other DNA
gaacttaccctgtaaagt

SEQ ID NO: 842 - DNA, 18 bp, synthetic construct
  source 1..18: mol_type = other DNA
gaactgatcctgtaaagt

SEQ ID NO: 843 - DNA, 18 bp, synthetic construct
  source 1..18: mol_type = other DNA
gaactgactctgtaaagt

SEQ ID NO: 844 - DNA, 18 bp, synthetic construct
  source 1..18: mol_type = other DNA
gaactgaccctgtaaaat

SEQ ID NO: 845 - DNA, 18 bp, synthetic construct
  source 1..18: mol_type = other DNA
ggaactgaccctgtaaag

SEQ ID NO: 846 - DNA, 18 bp, synthetic construct
  source 1..18: mol_type = other DNA
tgaactgaccctgtaaag

SEQ ID NO: 847 - DNA, 18 bp, synthetic construct
  source 1..18: mol_type = other DNA
ggaactgactctgtaaag

SEQ ID NO: 848 - DNA, 18 bp, synthetic construct
  source 1..18: mol_type = other DNA
ggaactgaccttgtaaag

SEQ ID NO: 849 - DNA, 18 bp, synthetic construct
  source 1..18: mol_type = other DNA
ggaactgaccctttaaag

SEQ ID NO: 850 - DNA, 18 bp, synthetic construct
  source 1..18: mol_type = other DNA
ggaactgaccctgtaaat

SEQ ID NO: 851 - DNA, 18 bp, synthetic construct
  source 1..18: mol_type = other DNA
gtaactgaccctgtaaag

SEQ ID NO: 852 - DNA, 18 bp, synthetic construct
  source 1..18: mol_type = other DNA
ggaattgaccctgtaaag

SEQ ID NO: 853 - DNA, 18 bp, synthetic construct
  source 1..18: mol_type = other DNA
ggaacttaccctgtaaag

SEQ ID NO: 854 - DNA, 18 bp, synthetic construct
  source 1..18: mol_type = other DNA
ggaactgatcctgtaaag

SEQ ID NO: 855 - DNA, 18 bp, synthetic construct
  source 1..18: mol_type = other DNA
ggaactgaccctgtaaaa

SEQ ID NO: 856 - DNA, 18 bp, synthetic construct
  source 1..18: mol_type = other DNA
cggaactgaccctgtaaa

SEQ ID NO: 857 - DNA, 18 bp, synthetic construct
  source 1..18: mol_type = other DNA
tggaactgaccctgtaaa

SEQ ID NO: 858 - DNA, 18 bp, synthetic construct
  source 1..18: mol_type = other DNA
cggaactgatcctgtaaa

SEQ ID NO: 859 - DNA, 18 bp, synthetic construct
  source 1..18: mol_type = other DNA
cggaactgactctgtaaa

SEQ ID NO: 860 - DNA, 18 bp, synthetic construct
  source 1..18: mol_type = other DNA
cggaactgaccttgtaaa

SEQ ID NO: 861 - DNA, 18 bp, synthetic construct
  source 1..18: mol_type = other DNA
cggaactgaccctttaaa

SEQ ID NO: 862 - DNA, 18 bp, synthetic construct
  source 1..18: mol_type = other DNA
ctgaactgaccctgtaaa

SEQ ID NO: 863 - DNA, 18 bp, synthetic construct
  source 1..18: mol_type = other DNA
cgtaactgaccctgtaaa

SEQ ID NO: 864 - DNA, 18 bp, synthetic construct
  source 1..18: mol_type = other DNA
cggaattgaccctgtaaa

SEQ ID NO: 865 - DNA, 18 bp, synthetic construct
  source 1..18: mol_type = other DNA
cggaacttaccctgtaaa

SEQ ID NO: 866 - DNA, 18 bp, synthetic construct
  source 1..18: mol_type = other DNA
cggaactgaccctataaa

SEQ ID NO: 867 - DNA, 18 bp, synthetic construct
  source 1..18: mol_type = other DNA
gcggaactgaccctgtaa

SEQ ID NO: 868 - DNA, 18 bp, synthetic construct
  source 1..18: mol_type = other DNA
tcggaactgaccctgtaa

SEQ ID NO: 869 - DNA, 18 bp, synthetic construct
  source 1..18: mol_type = other DNA
gcggaactgatcctgtaa

SEQ ID NO: 870 - DNA, 18 bp, synthetic construct
  source 1..18: mol_type = other DNA
gcggaactgactctgtaa

SEQ ID NO: 871 - DNA, 18 bp, synthetic construct
  source 1..18: mol_type = other DNA
gcggaactgaccttgtaa

SEQ ID NO: 872 - DNA, 18 bp, synthetic construct
  source 1..18: mol_type = other DNA
gcggaactgaccctttaa

SEQ ID NO: 873 - DNA, 18 bp, synthetic construct
  source 1..18: mol_type = other DNA
gtggaactgaccctgtaa

SEQ ID NO: 874 - DNA, 18 bp, synthetic construct
  source 1..18: mol_type = other DNA
gctgaactgaccctgtaa

SEQ ID NO: 875 - DNA, 18 bp, synthetic construct
  source 1..18: mol_type = other DNA
gcgtaactgaccctgtaa

SEQ ID NO: 876 - DNA, 18 bp, synthetic construct
  source 1..18: mol_type = other DNA
gcggaattgaccctgtaa

SEQ ID NO: 877 - DNA, 18 bp, synthetic construct
  source 1..18: mol_type = other DNA
gcggaacttaccctgtaa

SEQ ID NO: 878 - DNA, 18 bp, synthetic construct
  source 1..18: mol_type = other DNA
gcggaactgaccctataa

SEQ ID NO: 879 - DNA, 18 bp, synthetic construct
  source 1..18: mol_type = other DNA
agcggaactgaccctgta

SEQ ID NO: 880 - DNA, 18 bp, synthetic construct
  source 1..18: mol_type = other DNA
agcggaacttaccctgta

SEQ ID NO: 881 - DNA, 18 bp, synthetic construct
  source 1..18: mol_type = other DNA
agcggaactgatcctgta

SEQ ID NO: 882 - DNA, 18 bp, synthetic construct
  source 1..18: mol_type = other DNA
agcggaactgactctgta

SEQ ID NO: 883 - DNA, 18 bp, synthetic construct
  source 1..18: mol_type = other DNA
agcggaactgaccttgta

SEQ ID NO: 884 - DNA, 18 bp, synthetic construct
  source 1..18: mol_type = other DNA
agcggaactgacccttta

SEQ ID NO: 885 - DNA, 18 bp, synthetic construct
  source 1..18: mol_type = other DNA
atcggaactgaccctgta

SEQ ID NO: 886 - DNA, 18 bp, synthetic construct
  source 1..18: mol_type = other DNA
agtggaactgaccctgta

SEQ ID NO: 887 - DNA, 18 bp, synthetic construct
  source 1..18: mol_type = other DNA
agctgaactgaccctgta

SEQ ID NO: 888 - DNA, 18 bp, synthetic construct
  source 1..18: mol_type = other DNA
agcgtaactgaccctgta

SEQ ID NO: 889 - DNA, 18 bp, synthetic construct
  source 1..18: mol_type = other DNA
agcggaattgaccctgta

SEQ ID NO: 890 - DNA, 18 bp, synthetic construct
  source 1..18: mol_type = other DNA
agcggaactgaccctata

SEQ ID NO: 891 - DNA, 18 bp, synthetic construct
  source 1..18: mol_type = other DNA
aagcggaactgaccctgt

SEQ ID NO: 892 - DNA, 18 bp, synthetic construct
  source 1..18: mol_type = other DNA
aagcggaacttaccctgt

SEQ ID NO: 893 - DNA, 18 bp, synthetic construct
  source 1..18: mol_type = other DNA
aagcggaactgatcctgt

SEQ ID NO: 894 - DNA, 18 bp, synthetic construct
  source 1..18: mol_type = other DNA
aagcggaactgactctgt

SEQ ID NO: 895 - DNA, 18 bp, synthetic construct
  source 1..18: mol_type = other DNA
aagcggaactgaccttgt

SEQ ID NO: 896 - DNA, 18 bp, synthetic construct
  source 1..18: mol_type = other DNA
aagcggaactgacccttt

SEQ ID NO: 897 - DNA, 18 bp, synthetic construct
  source 1..18: mol_type = other DNA
aatcggaactgaccctgt

SEQ ID NO: 898 - DNA, 18 bp, synthetic construct
  source 1..18: mol_type = other DNA
aagtggaactgaccctgt

SEQ ID NO: 899 - DNA, 18 bp, synthetic construct
  source 1..18: mol_type = other DNA
aagctgaactgaccctgt

SEQ ID NO: 900 - DNA, 18 bp, synthetic construct
  source 1..18: mol_type = other DNA
aagcgtaactgaccctgt

SEQ ID NO: 901 - DNA, 18 bp, synthetic construct
  source 1..18: mol_type = other DNA
aagcggaattgaccctgt

SEQ ID NO: 902 - DNA, 18 bp, synthetic construct
  source 1..18: mol_type = other DNA
aagcggaactgaccctat

SEQ ID NO: 903 - DNA, 18 bp, synthetic construct
  source 1..18: mol_type = other DNA
gaagcggaactgaccctg

SEQ ID NO: 904 - DNA, 18 bp, synthetic construct
  source 1..18: mol_type = other DNA
taagcggaactgaccctg

SEQ ID NO: 905 - DNA, 18 bp, synthetic construct
  source 1..18: mol_type = other DNA
gaagcggaattgaccctg

SEQ ID NO: 906 - DNA, 18 bp, synthetic construct
  source 1..18: mol_type = other DNA
gaagcggaacttaccctg

SEQ ID NO: 907 - DNA, 18 bp, synthetic construct
  source 1..18: mol_type = other DNA
gaagcggaactgatcctg

SEQ ID NO: 908 - DNA, 18 bp, synthetic construct
  source 1..18: mol_type = other DNA
gaagcggaactgactctg

SEQ ID NO: 909 - DNA, 18 bp, synthetic construct
  source 1..18: mol_type = other DNA
gaagcggaactgaccttg

SEQ ID NO: 910 - DNA, 18 bp, synthetic construct
  source 1..18: mol_type = other DNA
gaagcggaactgaccctt

SEQ ID NO: 911 - DNA, 18 bp, synthetic construct
  source 1..18: mol_type = other DNA
gaatcggaactgaccctg

SEQ ID NO: 912 - DNA, 18 bp, synthetic construct
  source 1..18: mol_type = other DNA
gaagtggaactgaccctg

SEQ ID NO: 913 - DNA, 18 bp, synthetic construct
  source 1..18: mol_type = other DNA
gaagctgaactgaccctg

SEQ ID NO: 914 - DNA, 18 bp, synthetic construct
  source 1..18: mol_type = other DNA
gaagcgtaactgaccctg

SEQ ID NO: 915 - DNA, 18 bp, synthetic construct
  source 1..18: mol_type = other DNA
gaagcggaactgacccta

SEQ ID NO: 916 - DNA, 18 bp, synthetic construct
  source 1..18: mol_type = other DNA
tgaagcggaactgaccct

SEQ ID NO: 917 - DNA, 18 bp, synthetic construct
  source 1..18: mol_type = other DNA
tgaagcggaattgaccct

SEQ ID NO: 918 - DNA, 18 bp, synthetic construct
  source 1..18: mol_type = other DNA
tgaagcggaacttaccct

SEQ ID NO: 919 - DNA, 18 bp, synthetic construct
  source 1..18: mol_type = other DNA
tgaagcggaactgatcct

SEQ ID NO: 920 - DNA, 18 bp, synthetic construct
  source 1..18: mol_type = other DNA
tgaagcggaactgactct

SEQ ID NO: 921 - DNA, 18 bp, synthetic construct
  source 1..18: mol_type = other DNA
tgaagcggaactgacctt

SEQ ID NO: 922 - DNA, 18 bp, synthetic construct
  source 1..18: mol_type = other DNA
ttaagcggaactgaccct

SEQ ID NO: 923 - DNA, 18 bp, synthetic construct
  source 1..18: mol_type = other DNA
tgaatcggaactgaccct

SEQ ID NO: 924 - DNA, 18 bp, synthetic construct
  source 1..18: mol_type = other DNA
tgaagtggaactgaccct

SEQ ID NO: 925 - DNA, 18 bp, synthetic construct
  source 1..18: mol_type = other DNA
tgaagctgaactgaccct

SEQ ID NO: 926 - DNA, 18 bp, synthetic construct
  source 1..18: mol_type = other DNA
tgaagcgtaactgaccct

SEQ ID NO: 927 - DNA, 18 bp, synthetic construct
  source 1..18: mol_type = other DNA
tgaagcggaactaaccct

SEQ ID NO: 928 - DNA, 18 bp, synthetic construct
  source 1..18: mol_type = other DNA
gtgaagcggaactgaccc

SEQ ID NO: 929 - DNA, 18 bp, synthetic construct
  source 1..18: mol_type = other DNA
ttgaagcggaactgaccc

SEQ ID NO: 930 - DNA, 18 bp, synthetic construct
  source 1..18: mol_type = other DNA
gtgaagcggaattgaccc

SEQ ID NO: 931 - DNA, 18 bp, synthetic construct
  source 1..18: mol_type = other DNA
gtgaagcggaacttaccc

SEQ ID NO: 932 - DNA, 18 bp, synthetic construct
  source 1..18: mol_type = other DNA
gtgaagcggaactgatcc

SEQ ID NO: 933 - DNA, 18 bp, synthetic construct
  source 1..18: mol_type = other DNA
gtgaagcggaactgactc

SEQ ID NO: 934 - DNA, 18 bp, synthetic construct
  source 1..18: mol_type = other DNA
gtgaagcggaactgacct

SEQ ID NO: 935 - DNA, 18 bp, synthetic construct
  source 1..18: mol_type = other DNA
gttaagcggaactgaccc

SEQ ID NO: 936 - DNA, 18 bp, synthetic construct
  source 1..18: mol_type = other DNA
gtgaatcggaactgaccc

SEQ ID NO: 937 - DNA, 18 bp, synthetic construct
  source 1..18: mol_type = other DNA
gtgaagtggaactgaccc

SEQ ID NO: 938 - DNA, 18 bp, synthetic construct
  source 1..18: mol_type = other DNA
gtgaagctgaactgaccc

SEQ ID NO: 939 - DNA, 18 bp, synthetic construct
  source 1..18: mol_type = other DNA
gtgaagcgtaactgaccc

SEQ ID NO: 940 - DNA, 18 bp, synthetic construct
  source 1..18: mol_type = other DNA
gtgaagcggaactaaccc

SEQ ID NO: 941 - DNA, 18 bp, synthetic construct
  source 1..18: mol_type = other DNA
ggtgaagcggaactgacc

SEQ ID NO: 942 - DNA, 18 bp, synthetic construct
  source 1..18: mol_type = other DNA
tgtgaagcggaactgacc

SEQ ID NO: 943 - DNA, 18 bp, synthetic construct
  source 1..18: mol_type = other DNA
ggtgaagcgtaactgacc

SEQ ID NO: 944 - DNA, 18 bp, synthetic construct
  source 1..18: mol_type = other DNA
ggtgaagcggaattgacc

SEQ ID NO: 945 - DNA, 18 bp, synthetic construct
  source 1..18: mol_type = other DNA
ggtgaagcggaacttacc

SEQ ID NO: 946 - DNA, 18 bp, synthetic construct
  source 1..18: mol_type = other DNA
ggtgaagcggaactgatc

SEQ ID NO: 947 - DNA, 18 bp, synthetic construct
  source 1..18: mol_type = other DNA
ggtgaagcggaactgact

SEQ ID NO: 948 - DNA, 18 bp, synthetic construct
  source 1..18: mol_type = other DNA
gttgaagcggaactgacc

SEQ ID NO: 949 - DNA, 18 bp, synthetic construct
  source 1..18: mol_type = other DNA
ggttaagcggaactgacc

SEQ ID NO: 950 - DNA, 18 bp, synthetic construct
  source 1..18: mol_type = other DNA
ggtgaatcggaactgacc

SEQ ID NO: 951 - DNA, 18 bp, synthetic construct
  source 1..18: mol_type = other DNA
ggtgaagtggaactgacc

SEQ ID NO: 952 - DNA, 18 bp, synthetic construct
  source 1..18: mol_type = other DNA
ggtgaagctgaactgacc

SEQ ID NO: 953 - DNA, 18 bp, synthetic construct
  source 1..18: mol_type = other DNA
ggtgaagcggaactaacc

SEQ ID NO: 954 - DNA, 18 bp, synthetic construct
  source 1..18: mol_type = other DNA
aggtgaagcggaactgac

SEQ ID NO: 955 - DNA, 18 bp, synthetic construct
  source 1..18: mol_type = other DNA
aggtgaagctgaactgac

SEQ ID NO: 956 - DNA, 18 bp, synthetic construct
  source 1..18: mol_type = other DNA
aggtgaagcgtaactgac

SEQ ID NO: 957 - DNA, 18 bp, synthetic construct
  source 1..18: mol_type = other DNA
aggtgaagcggaattgac

SEQ ID NO: 958 - DNA, 18 bp, synthetic construct
  source 1..18: mol_type = other DNA
aggtgaagcggaacttac

SEQ ID NO: 959 - DNA, 18 bp, synthetic construct
  source 1..18: mol_type = other DNA
aggtgaagcggaactgat

SEQ ID NO: 960 - DNA, 18 bp, synthetic construct
  source 1..18: mol_type = other DNA
atgtgaagcggaactgac

SEQ ID NO: 961 - DNA, 18 bp, synthetic construct
  source 1..18: mol_type = other DNA
agttgaagcggaactgac

SEQ ID NO: 962 - DNA, 18 bp, synthetic construct
  source 1..18: mol_type = other DNA
aggttaagcggaactgac

SEQ ID NO: 963 - DNA, 18 bp, synthetic construct
  source 1..18: mol_type = other DNA
aggtgaatcggaactgac

SEQ ID NO: 964 - DNA, 18 bp, synthetic construct
  source 1..18: mol_type = other DNA
aggtgaagtggaactgac

SEQ ID NO: 965 - DNA, 18 bp, synthetic construct
  source 1..18: mol_type = other DNA
aggtgaagcggaactaac

SEQ ID NO: 966 - DNA, 18 bp, synthetic construct
  source 1..18: mol_type = other DNA
gaggtgaagcggaactga

SEQ ID NO: 967 - DNA, 18 bp, synthetic construct
  source 1..18: mol_type = other DNA
taggtgaagcggaactga

SEQ ID NO: 968 - DNA, 18 bp, synthetic construct
  source 1..18: mol_type = other DNA
gaggtgaagtggaactga

SEQ ID NO: 969 - DNA, 18 bp, synthetic construct
  source 1..18: mol_type = other DNA
gaggtgaagctgaactga

SEQ ID NO: 970 - DNA, 18 bp, synthetic construct
  source 1..18: mol_type = other DNA
gaggtgaagcgtaactga

SEQ ID NO: 971 - DNA, 18 bp, synthetic construct
  source 1..18: mol_type = other DNA
gaggtgaagcggaattga

SEQ ID NO: 972 - DNA, 18 bp, synthetic construct
  source 1..18: mol_type = other DNA
gaggtgaagcggaactta

SEQ ID NO: 973 - DNA, 18 bp, synthetic construct
  source 1..18: mol_type = other DNA
gatgtgaagcggaactga

SEQ ID NO: 974 - DNA, 18 bp, synthetic construct
  source 1..18: mol_type = other DNA
gagttgaagcggaactga

SEQ ID NO: 975 - DNA, 18 bp, synthetic construct
  source 1..18: mol_type = other DNA
gaggttaagcggaactga

SEQ ID NO: 976 - DNA, 18 bp, synthetic construct
  source 1..18: mol_type = other DNA
gaggtgaatcggaactga

SEQ ID NO: 977 - DNA, 18 bp, synthetic construct
  source 1..18: mol_type = other DNA
gaggtgaagcggaactaa

SEQ ID NO: 978 - DNA, 18 bp, synthetic construct
  source 1..18: mol_type = other DNA
ggaggtgaagcggaactg

SEQ ID NO: 979 - DNA, 18 bp, synthetic construct
  source 1..18: mol_type = other DNA
tgaggtgaagcggaactg

SEQ ID NO: 980 - DNA, 18 bp, synthetic construct
  source 1..18: mol_type = other DNA
ggaggtgaatcggaactg

SEQ ID NO: 981 - DNA, 18 bp, synthetic construct
  source 1..18: mol_type = other DNA
ggaggtgaagtggaactg

SEQ ID NO: 982 - DNA, 18 bp, synthetic construct
  source 1..18: mol_type = other DNA
ggaggtgaagctgaactg

SEQ ID NO: 983 - DNA, 18 bp, synthetic construct
  source 1..18: mol_type = other DNA
ggaggtgaagcgtaactg

SEQ ID NO: 984 - DNA, 18 bp, synthetic construct
  source 1..18: mol_type = other DNA
ggaggtgaagcggaattg

SEQ ID NO: 985 - DNA, 18 bp, synthetic construct
  source 1..18: mol_type = other DNA
ggaggtgaagcggaactt

SEQ ID NO: 986 - DNA, 18 bp, synthetic construct
  source 1..18: mol_type = other DNA
gtaggtgaagcggaactg

SEQ ID NO: 987 - DNA, 18 bp, synthetic construct
  source 1..18: mol_type = other DNA
ggatgtgaagcggaactg

SEQ ID NO: 988 - DNA, 18 bp, synthetic construct
  source 1..18: mol_type = other DNA
ggagttgaagcggaactg

SEQ ID NO: 989 - DNA, 18 bp, synthetic construct
  source 1..18: mol_type = other DNA
ggaggttaagcggaactg

SEQ ID NO: 990 - DNA, 18 bp, synthetic construct
  source 1..18: mol_type = other DNA
ggaggtgaagcggaacta

SEQ ID NO: 991 - DNA, 18 bp, synthetic construct
  source 1..18: mol_type = other DNA
aggaggtgaagcggaact

SEQ ID NO: 992 - DNA, 18 bp, synthetic construct
  source 1..18: mol_type = other DNA
aggaggtgaatcggaact

SEQ ID NO: 993 - DNA, 18 bp, synthetic construct
  source 1..18: mol_type = other DNA
aggaggtgaagtggaact

SEQ ID NO: 994 - DNA, 18 bp, synthetic construct
  source 1..18: mol_type = other DNA
aggaggtgaagctgaact

SEQ ID NO: 995 - DNA, 18 bp, synthetic construct
  source 1..18: mol_type = other DNA
aggaggtgaagcgtaact

SEQ ID NO: 996 - DNA, 18 bp, synthetic construct
  source 1..18: mol_type = other DNA
aggaggtgaagcggaatt

SEQ ID NO: 997 - DNA, 18 bp, synthetic construct
  source 1..18: mol_type = other DNA
atgaggtgaagcggaact

SEQ ID NO: 998 - DNA, 18 bp, synthetic construct
  source 1..18: mol_type = other DNA
agtaggtgaagcggaact

SEQ ID NO: 999 - DNA, 18 bp, synthetic construct
  source 1..18: mol_type = other DNA
aggatgtgaagcggaact

SEQ ID NO: 1000 - DNA, 18 bp, synthetic construct
  source 1..18: mol_type = other DNA
aggagttgaagcggaact

SEQ ID NO: 1001 - DNA, 18 bp, synthetic construct
  source 1..18: mol_type = other DNA
aggaggttaagcggaact

SEQ ID NO: 1002 - DNA, 18 bp, synthetic construct
  source 1..18: mol_type = other DNA
aggaggtgaagcgaaact

SEQ ID NO: 1003 - DNA, 18 bp, synthetic construct
  source 1..18: mol_type = other DNA
aaggaggtgaagcggaac

SEQ ID NO: 1004 - DNA, 18 bp, synthetic construct
  source 1..18: mol_type = other DNA
aaggaggtgaatcggaac

SEQ ID NO: 1005 - DNA, 18 bp, synthetic construct
  source 1..18: mol_type = other DNA
aaggaggtgaagtggaac

SEQ ID NO: 1006 - DNA, 18 bp, synthetic construct
  source 1..18: mol_type = other DNA
aaggaggtgaagctgaac

SEQ ID NO: 1007 - DNA, 18 bp, synthetic construct
  source 1..18: mol_type = other DNA
aaggaggtgaagcgtaac

SEQ ID NO: 1008 - DNA, 18 bp, synthetic construct
  source 1..18: mol_type = other DNA
aaggaggtgaagcggaat

SEQ ID NO: 1009 - DNA, 18 bp, synthetic construct
  source 1..18: mol_type = other DNA
aatgaggtgaagcggaac

SEQ ID NO: 1010 - DNA, 18 bp, synthetic construct
  source 1..18: mol_type = other DNA
aagtaggtgaagcggaac

SEQ ID NO: 1011 - DNA, 18 bp, synthetic construct
  source 1..18: mol_type = other DNA
aaggatgtgaagcggaac

SEQ ID NO: 1012 - DNA, 18 bp, synthetic construct
  source 1..18: mol_type = other DNA
aaggagttgaagcggaac

SEQ ID NO: 1013 - DNA, 18 bp, synthetic construct
  source 1..18: mol_type = other DNA
aaggaggttaagcggaac

SEQ ID NO: 1014 - DNA, 18 bp, synthetic construct
  source 1..18: mol_type = other DNA
aaggaggtgaagcgaaac

SEQ ID NO: 1015 - DNA, 18 bp, synthetic construct
  source 1..18: mol_type = other DNA
aaaggaggtgaagcggaa

SEQ ID NO: 1016 - DNA, 18 bp, synthetic construct
  source 1..18: mol_type = other DNA
aaaggaggttaagcggaa

SEQ ID NO: 1017 - DNA, 18 bp, synthetic construct
  source 1..18: mol_type = other DNA
aaaggaggtgaatcggaa

SEQ ID NO: 1018 - DNA, 18 bp, synthetic construct
  source 1..18: mol_type = other DNA
aaaggaggtgaagtggaa

SEQ ID NO: 1019 - DNA, 18 bp, synthetic construct
  source 1..18: mol_type = other DNA
aaaggaggtgaagctgaa

SEQ ID NO: 1020 - DNA, 18 bp, synthetic construct
  source 1..18: mol_type = other DNA
aaaggaggtgaagcgtaa

SEQ ID NO: 1021 - DNA, 18 bp, synthetic construct
  source 1..18: mol_type = other DNA
aaatgaggtgaagcggaa

SEQ ID NO: 1022 - DNA, 18 bp, synthetic construct
  source 1..18: mol_type = other DNA
aaagtaggtgaagcggaa

SEQ ID NO: 1023 - DNA, 18 bp, synthetic construct
  source 1..18: mol_type = other DNA
aaaggatgtgaagcggaa

SEQ ID NO: 1024 - DNA, 18 bp, synthetic construct
  source 1..18: mol_type = other DNA
aaaggagttgaagcggaa

SEQ ID NO: 1025 - DNA, 18 bp, synthetic construct
  source 1..18: mol_type = other DNA
aaaggaggtgaagcgaaa

SEQ ID NO: 1026 - DNA, 18 bp, synthetic construct
  source 1..18: mol_type = other DNA
aaaaggaggtgaagcgga

SEQ ID NO: 1027 - DNA, 18 bp, synthetic construct
  source 1..18: mol_type = other DNA
aaaaggaggttaagcgga

SEQ ID NO: 1028 - DNA, 18 bp, synthetic construct
  source 1..18: mol_type = other DNA
aaaaggaggtgaatcgga

SEQ ID NO: 1029 - DNA, 18 bp, synthetic construct
  source 1..18: mol_type = other DNA
aaaaggaggtgaagtgga

SEQ ID NO: 1030 - DNA, 18 bp, synthetic construct
  source 1..18: mol_type = other DNA
aaaaggaggtgaagctga

SEQ ID NO: 1031 - DNA, 18 bp, synthetic construct
  source 1..18: mol_type = other DNA
aaaaggaggtgaagcgta

SEQ ID NO: 1032 - DNA, 18 bp, synthetic construct
  source 1..18: mol_type = other DNA
aaaatgaggtgaagcgga

SEQ ID NO: 1033 - DNA, 18 bp, synthetic construct
  source 1..18: mol_type = other DNA
aaaagtaggtgaagcgga

SEQ ID NO: 1034 - DNA, 18 bp, synthetic construct
  source 1..18: mol_type = other DNA
aaaaggatgtgaagcgga

SEQ ID NO: 1035 - DNA, 18 bp, synthetic construct
  source 1..18: mol_type = other DNA
aaaaggagttgaagcgga

SEQ ID NO: 1036 - DNA, 18 bp, synthetic construct
  source 1..18: mol_type = other DNA
aaaaggaggtgaagcgaa

SEQ ID NO: 1037 - DNA, 18 bp, synthetic construct
  source 1..18: mol_type = other DNA
caaaaggaggtgaagcgg

SEQ ID NO: 1038 - DNA, 18 bp, synthetic construct
  source 1..18: mol_type = other DNA
taaaaggaggtgaagcgg

SEQ ID NO: 1039 - DNA, 18 bp, synthetic construct
  source 1..18: mol_type = other DNA
caaaaggagttgaagcgg

SEQ ID NO: 1040 - DNA, 18 bp, synthetic construct
  source 1..18: mol_type = other DNA
caaaaggaggttaagcgg

SEQ ID NO: 1041 - DNA, 18 bp, synthetic construct
  source 1..18: mol_type = other DNA
caaaaggaggtgaatcgg

SEQ ID NO: 1042 - DNA, 18 bp, synthetic construct
  source 1..18: mol_type = other DNA
caaaaggaggtgaagtgg

SEQ ID NO: 1043 - DNA, 18 bp, synthetic construct
  source 1..18: mol_type = other DNA
caaaaggaggtgaagctg

SEQ ID NO: 1044 - DNA, 18 bp, synthetic construct
  source 1..18: mol_type = other DNA
caaaaggaggtgaagcgt

SEQ ID NO: 1045 - DNA, 18 bp, synthetic construct
  source 1..18: mol_type = other DNA
caaaatgaggtgaagcgg

SEQ ID NO: 1046 - DNA, 18 bp, synthetic construct
  source 1..18: mol_type = other DNA
caaaagtaggtgaagcgg

SEQ ID NO: 1047 - DNA, 18 bp, synthetic construct
  source 1..18: mol_type = other DNA
caaaaggatgtgaagcgg

SEQ ID NO: 1048 - DNA, 18 bp, synthetic construct
  source 1..18: mol_type = other DNA
caaaaggaggtgaagcga

SEQ ID NO: 1049 - DNA, 18 bp, synthetic construct
  source 1..18: mol_type = other DNA
acaaaaggaggtgaagcg

SEQ ID NO: 1050 - DNA, 18 bp, synthetic construct
  source 1..18: mol_type = other DNA
acaaaaggatgtgaagcg

SEQ ID NO: 1051 - DNA, 18 bp, synthetic construct
  source 1..18: mol_type = other DNA
acaaaaggagttgaagcg

SEQ ID NO: 1052 - DNA, 18 bp, synthetic construct
  source 1..18: mol_type = other DNA
acaaaaggaggttaagcg

SEQ ID NO: 1053 - DNA, 18 bp, synthetic construct
  source 1..18: mol_type = other DNA
acaaaaggaggtgaatcg

SEQ ID NO: 1054 - DNA, 18 bp, synthetic construct
  source 1..18: mol_type = other DNA
acaaaaggaggtgaagtg

SEQ ID NO: 1055 - DNA, 18 bp, synthetic construct
  source 1..18: mol_type = other DNA
acaaaaggaggtgaagct

SEQ ID NO: 1056 - DNA, 18 bp, synthetic construct
  source 1..18: mol_type = other DNA
ataaaaggaggtgaagcg

SEQ ID NO: 1057 - DNA, 18 bp, synthetic construct
  source 1..18: mol_type = other DNA
acaaaatgaggtgaagcg

SEQ ID NO: 1058 - DNA, 18 bp, synthetic construct
  source 1..18: mol_type = other DNA
acaaaagtaggtgaagcg

SEQ ID NO: 1059 - DNA, 18 bp, synthetic construct
  source 1..18: mol_type = other DNA
acaaaaggaggtgaagca

SEQ ID NO: 1060 - DNA, 18 bp, synthetic construct
  source 1..18: mol_type = other DNA
tacaaaaggaggtgaagc

SEQ ID NO: 1061 - DNA, 18 bp, synthetic construct
  source 1..18: mol_type = other DNA
tacaaaaggatgtgaagc

SEQ ID NO: 1062 - DNA, 18 bp, synthetic construct
  source 1..18: mol_type = other DNA
tacaaaaggagttgaagc

SEQ ID NO: 1063 - DNA, 18 bp, synthetic construct
  source 1..18: mol_type = other DNA
tacaaaaggaggttaagc

SEQ ID NO: 1064 - DNA, 18 bp, synthetic construct
  source 1..18: mol_type = other DNA
tacaaaaggaggtgaatc

SEQ ID NO: 1065 - DNA, 18 bp, synthetic construct
  source 1..18: mol_type = other DNA
tacaaaaggaggtgaagt

SEQ ID NO: 1066 - DNA, 18 bp, synthetic construct
  source 1..18: mol_type = other DNA
tataaaaggaggtgaagc

SEQ ID NO: 1067 - DNA, 18 bp, synthetic construct
  source 1..18: mol_type = other DNA
tacaaaatgaggtgaagc

SEQ ID NO: 1068 - DNA, 18 bp, synthetic construct
  source 1..18: mol_type = other DNA
tacaaaagtaggtgaagc

SEQ ID NO: 1069 - DNA, 18 bp, synthetic construct
  source 1..18: mol_type = other DNA
tacaaaaggaggtgaaac

SEQ ID NO: 1070 - DNA, 18 bp, synthetic construct
  source 1..18: mol_type = other DNA
atacaaaaggaggtgaag

SEQ ID NO: 1071 - DNA, 18 bp, synthetic construct
  source 1..18: mol_type = other DNA
atacaaaagtaggtgaag

SEQ ID NO: 1072 - DNA, 18 bp, synthetic construct
  source 1..18: mol_type = other DNA
atacaaaaggatgtgaag

SEQ ID NO: 1073 - DNA, 18 bp, synthetic construct
  source 1..18: mol_type = other DNA
atacaaaaggagttgaag

SEQ ID NO: 1074 - DNA, 18 bp, synthetic construct
  source 1..18: mol_type = other DNA
atacaaaaggaggttaag

SEQ ID NO: 1075 - DNA, 18 bp, synthetic construct
  source 1..18: mol_type = other DNA
atacaaaaggaggtgaat

SEQ ID NO: 1076 - DNA, 18 bp, synthetic construct
  source 1..18: mol_type = other DNA
atataaaaggaggtgaag

SEQ ID NO: 1077 - DNA, 18 bp, synthetic construct
  source 1..18: mol_type = other DNA
atacaaaatgaggtgaag

SEQ ID NO: 1078 - DNA, 18 bp, synthetic construct
  source 1..18: mol_type = other DNA
atacaaaaggaggtgaaa

SEQ ID NO: 1079 - DNA, 76 bp, synthetic construct
  source 1..76: mol_type = other DNA
ttttggttccgttcaatttgggtttttaactttacagggtcagttccgcttcacctccttttgtatggagttccat

SEQ ID NO: 1080 - DNA, 20 bp, synthetic construct
  source 1..20: mol_type = other DNA
actgaccctgtaaagttaaa

SEQ ID NO: 1081 - DNA, 20 bp, synthetic construct
  source 1..20: mol_type = other DNA
gaactgaccctgtaaagtta

SEQ ID NO: 1082 - DNA, 20 bp, synthetic construct
  source 1..20: mol_type = other DNA
cggaactgaccctgtaaagt

SEQ ID NO: 1083 - DNA, 16 bp, synthetic construct
  source 1..16: mol_type = other DNA
actgaccctgtaaagt

SEQ ID NO: 1084 - DNA, 15 bp, synthetic construct
  source 1..15: mol_type = other DNA
aactgaccctgtaaa

SEQ ID NO: 1085 - DNA, 18 bp, synthetic construct
  source 1..18: mol_type = other DNA
accctgtaaagttaaaaa

SEQ ID NO: 1086 - DNA, 20 bp, synthetic construct
  source 1..20: mol_type = other DNA
tgaccctgtaaagttaaaaa

SEQ ID NO: 1087 - DNA, 20 bp, synthetic construct
  source 1..20: mol_type = other DNA
agcggaactgaccctgtaaa

SEQ ID NO: 1088 - DNA, 20 bp, synthetic construct
  source 1..20: mol_type = other DNA
aagcggaactgaccctgtaa

SEQ ID NO: 1089 - DNA, 18 bp, synthetic construct
  source 1..18: mol_type = other DNA
catacaaaaggaggtgaa

SEQ ID NO: 1090 - DNA, 20 bp, synthetic construct
  source 1..20: mol_type = other DNA
tccatacaaaaggaggtgaa

SEQ ID NO: 1091 - DNA, 18 bp, synthetic construct
  source 1..18: mol_type = other DNA
atggaactccatacaaaa

SEQ ID NO: 1092 - DNA, 18 bp, synthetic construct
  source 1..18: mol_type = other DNA
aattgaacggaaccaaaa

SEQ ID NO: 1093 - DNA, 18 bp, synthetic construct
  source 1..18: mol_type = other DNA
taaagttaaaaacccaaa

SEQ ID NO: 1094 - DNA, 17 bp, synthetic construct
  source 1..17: mol_type = other DNA
gcggaactgaccctgta

SEQ ID NO: 1095 - DNA, 25 bp, synthetic construct
  source 1..25: mol_type = other DNA
cggaactgaccctgtaaagttaaaa

SEQ ID NO: 1096 - DNA, 15 bp, synthetic construct
  source 1..15: mol_type = other DNA
  misc_feature 8: note = <INSDQualifier_value>Locked Nucleic Acid</INSDQualifier_value>
  misc_feature 12: note = <INSDQualifier_value>Locked Nucleic Acid</INSDQualifier_value>
  misc_feature 4: note = <INSDQualifier_value>Locked Nucleic Acid</INSDQualifier_value>
aactgaccctgtaaa

SEQ ID NO: 1097 - DNA, 15 bp, synthetic construct
  source 1..15: mol_type = other DNA
  misc_feature 4: note = <INSDQualifier_value>Locked Nucleic Acid</INSDQualifier_value>
  misc_feature 7: note = <INSDQualifier_value>Locked Nucleic Acid</INSDQualifier_value>
  misc_feature 12: note = <INSDQualifier_value>Locked Nucleic Acid</INSDQualifier_value>
aactgaccctgtaaa

SEQ ID NO: 1098 - DNA, 15 bp, synthetic construct
  source 1..15: mol_type = other DNA
  misc_feature 4: note = <INSDQualifier_value>Locked Nucleic Acid</INSDQualifier_value>
  misc_feature 12: note = <INSDQualifier_value>Locked Nucleic Acid</INSDQualifier_value>
aactgaccctgtaaa

SEQ ID NO: 1099 - DNA, 15 bp, synthetic construct
  source 1..15: mol_type = other DNA
  misc_feature 7: note = <INSDQualifier_value>Locked Nucleic Acid</INSDQualifier_value>
  misc_feature 12: note = <INSDQualifier_value>Locked Nucleic Acid</INSDQualifier_value>
aactgaccctgtaaa

SEQ ID NO: 1100 - DNA, 15 bp, synthetic construct
  source 1..15: mol_type = other DNA
  misc_feature 6: note = <INSDQualifier_value>Locked Nucleic Acid</INSDQualifier_value>
  misc_feature 12: note = <INSDQualifier_value>Locked Nucleic Acid</INSDQualifier_value>
aactgaccctgtaaa

SEQ ID NO: 1101 - DNA, 15 bp, synthetic construct
  source 1..15: mol_type = other DNA
  misc_feature 1: note = <INSDQualifier_value>Locked Nucleic Acid</INSDQualifier_value>
  misc_feature 10: note = <INSDQualifier_value>Locked Nucleic Acid</INSDQualifier_value>
aactgaccctgtaaa

SEQ ID NO: 1102 - DNA, 15 bp, synthetic construct
  source 1..15: mol_type = other DNA
  misc_feature 6: note = <INSDQualifier_value>Locked Nucleic Acid</INSDQualifier_value>
  misc_feature 15: note = <INSDQualifier_value>Locked Nucleic Acid</INSDQualifier_value>
aactgaccctgtaaa

SEQ ID NO: 1103 - DNA, 15 bp, synthetic construct
  source 1..15: mol_type = other DNA
  misc_feature 1: note = <INSDQualifier_value>Locked Nucleic Acid</INSDQualifier_value>
  misc_feature 8: note = <INSDQualifier_value>Locked Nucleic Acid</INSDQualifier_value>
  misc_feature 15: note = <INSDQualifier_value>Locked Nucleic Acid</INSDQualifier_value>
aactgaccctgtaaa

SEQ ID NO: 1104 - DNA, 20 bp, synthetic construct
  source 1..20: mol_type = other DNA
  misc_feature 4: note = <INSDQualifier_value>Locked Nucleic Acid</INSDQualifier_value>
  misc_feature 6: note = <INSDQualifier_value>Locked Nucleic Acid</INSDQualifier_value>
  misc_feature 5: note = <INSDQualifier_value>Abasic Spacer</INSDQualifier_value>
agcgsaactgaccctgtaaa

SEQ ID NO: 1105 - DNA, 20 bp, synthetic construct
  source 1..20: mol_type = other DNA
  misc_feature 4: note = <INSDQualifier_value>Locked Nucleic Acid</INSDQualifier_value>
  misc_feature 6: note = <INSDQualifier_value>Locked Nucleic Acid</INSDQualifier_value>
  misc_feature 5: note = <INSDQualifier_value>Abasic Spacer</INSDQualifier_value>
  misc_feature 13: note = <INSDQualifier_value>Abasic Spacer</INSDQualifier_value>
agcgsaactgacsctgtaaa

SEQ ID NO: 1106 - DNA, 20 bp, synthetic construct
  source 1..20: mol_type = other DNA
  misc_feature 9: note = <INSDQualifier_value>Locked Nucleic Acid</INSDQualifier_value>
  misc_feature 11: note = <INSDQualifier_value>Locked Nucleic Acid</INSDQualifier_value>
  misc_feature 10: note = <INSDQualifier_value>Abasic Spacer</INSDQualifier_value>
agcggaactsaccctgtaaa

SEQ ID NO: 1107 - DNA, 20 bp, synthetic construct
  source 1..20: mol_type = other DNA
  misc_feature 3: note = <INSDQualifier_value>Locked Nucleic Acid</INSDQualifier_value>
  misc_feature 17: note = <INSDQualifier_value>Locked Nucleic Acid</INSDQualifier_value>
agcggaactgaccctgtaaa

SEQ ID NO: 1108 - DNA, 20 bp, synthetic construct
  source 1..20: mol_type = other DNA
  misc_feature 4: note = <INSDQualifier_value>Locked Nucleic Acid</INSDQualifier_value>
  misc_feature 17: note = <INSDQualifier_value>Locked Nucleic Acid</INSDQualifier_value>
  misc_feature 5: note = <INSDQualifier_value>Abasic Spacer</INSDQualifier_value>
agcgsaactgaccctgtaaa

SEQ ID NO: 1109 - DNA, 17 bp, synthetic construct
  source 1..17: mol_type = other DNA
  misc_feature 3: note = <INSDQualifier_value>Locked Nucleic Acid</INSDQualifier_value>
  misc_feature 5: note = <INSDQualifier_value>Locked Nucleic Acid</INSDQualifier_value>
  misc_feature 4: note = <INSDQualifier_value>Abasic Spacer</INSDQualifier_value>
gcgsaactgaccctgta

SEQ ID NO: 1110 - DNA, 17 bp, synthetic construct
  source 1..17: mol_type = other DNA
  misc_feature 8: note = <INSDQualifier_value>Locked Nucleic Acid</INSDQualifier_value>
  misc_feature 10: note = <INSDQualifier_value>Locked Nucleic Acid</INSDQualifier_value>
  misc_feature 9: note = <INSDQualifier_value>Abasic Spacer</INSDQualifier_value>
gcggaactsaccctgta

SEQ ID NO: 1111 - DNA, 17 bp, synthetic construct
  source 1..17: mol_type = other DNA
  misc_feature 5: note = <INSDQualifier_value>Locked Nucleic Acid</INSDQualifier_value>
  misc_feature 10: note = <INSDQualifier_value>Locked Nucleic Acid</INSDQualifier_value>
  misc_feature 14: note = <INSDQualifier_value>Locked Nucleic Acid</INSDQualifier_value>
gcggaactgaccctgta

SEQ ID NO: 1112 - DNA, 17 bp, synthetic construct
  source 1..17: mol_type = other DNA
  misc_feature 2: note = <INSDQualifier_value>Locked Nucleic Acid</INSDQualifier_value>
  misc_feature 16: note = <INSDQualifier_value>Locked Nucleic Acid</INSDQualifier_value>
gcggaactgaccctgta

SEQ ID NO: 1113 - DNA, 17 bp, synthetic construct
  source 1..17: mol_type = other DNA
  misc_feature 2: note = <INSDQualifier_value>Locked Nucleic Acid</INSDQualifier_value>
  misc_feature 16: note = <INSDQualifier_value>Locked Nucleic Acid</INSDQualifier_value>
  misc_feature 3: note = <INSDQualifier_value>Abasic Spacer</INSDQualifier_value>
gcsgaactgaccctgta

SEQ ID NO: 1114 - DNA, 18 bp, synthetic construct
  source 1..18: mol_type = other DNA
  misc_feature 3: note = <INSDQualifier_value>Locked Nucleic Acid</INSDQualifier_value>
  misc_feature 5: note = <INSDQualifier_value>Locked Nucleic Acid</INSDQualifier_value>
  misc_feature 4: note = <INSDQualifier_value>Abasic Spacer</INSDQualifier_value>
atgsaactccatacaaaa

SEQ ID NO: 1115 - DNA, 18 bp, synthetic construct
  source 1..18: mol_type = other DNA
  misc_feature 3: note = <INSDQualifier_value>Locked Nucleic Acid</INSDQualifier_value>
  misc_feature 5: note = <INSDQualifier_value>Locked Nucleic Acid</INSDQualifier_value>
  misc_feature 4: note = <INSDQualifier_value>Abasic Spacer</INSDQualifier_value>
  misc_feature 14: note = <INSDQualifier_value>Abasic Spacer</INSDQualifier_value>
atgsaactccatasaaaa

SEQ ID NO: 1116 - DNA, 18 bp, synthetic construct
  source 1..18: mol_type = other DNA
  misc_feature 3: note = <INSDQualifier_value>Locked Nucleic Acid</INSDQualifier_value>
  misc_feature 5: note = <INSDQualifier_value>Locked Nucleic Acid</INSDQualifier_value>
  misc_feature 4: note = <INSDQualifier_value>Abasic Spacer</INSDQualifier_value>
  misc_feature 10: note = <INSDQualifier_value>Abasic Spacer</INSDQualifier_value>
atgsaactcsatacaaaa

SEQ ID NO: 1117 - DNA, 18 bp, synthetic construct
  source 1..18: mol_type = other DNA
  misc_feature 9: note = <INSDQualifier_value>Locked Nucleic Acid</INSDQualifier_value>
  misc_feature 11: note = <INSDQualifier_value>Locked Nucleic Acid</INSDQualifier_value>
  misc_feature 10: note = <INSDQualifier_value>Abasic Spacer</INSDQualifier_value>
atggaactcsatacaaaa

SEQ ID NO: 1118 - DNA, 18 bp, synthetic construct
  source 1..18: mol_type = other DNA
  misc_feature 13: note = <INSDQualifier_value>Locked Nucleic Acid</INSDQualifier_value>
  misc_feature 15: note = <INSDQualifier_value>Locked Nucleic Acid</INSDQualifier_value>
  misc_feature 14: note = <INSDQualifier_value>Abasic Spacer</INSDQualifier_value>
atggaactccatasaaaa

SEQ ID NO: 1119 - DNA, 18 bp, synthetic construct
  source 1..18: mol_type = other DNA
  misc_feature 2: note = <INSDQualifier_value>Locked Nucleic Acid</INSDQualifier_value>
  misc_feature 16: note = <INSDQualifier_value>Locked Nucleic Acid</INSDQualifier_value>
atggaactccatacaaaa

SEQ ID NO: 1120 - DNA, 18 bp, synthetic construct
  source 1..18: mol_type = other DNA
  misc_feature 3: note = <INSDQualifier_value>Locked Nucleic Acid</INSDQualifier_value>
  misc_feature 16: note = <INSDQualifier_value>Locked Nucleic Acid</INSDQualifier_value>
atggaactccatacaaaa

SEQ ID NO: 1121 - DNA, 18 bp, synthetic construct
  source 1..18: mol_type = other DNA
  misc_feature 15: note = <INSDQualifier_value>Locked Nucleic Acid</INSDQualifier_value>
  misc_feature 13: note = <INSDQualifier_value>Locked Nucleic Acid</INSDQualifier_value>
  misc_feature 14: note = <INSDQualifier_value>Abasic Spacer</INSDQualifier_value>
taaagttaaaaacscaaa

SEQ ID NO: 1122 - DNA, 18 bp, synthetic construct
  source 1..18: mol_type = other DNA
  misc_feature 3: note = <INSDQualifier_value>Locked Nucleic Acid</INSDQualifier_value>
  misc_feature 5: note = <INSDQualifier_value>Locked Nucleic Acid</INSDQualifier_value>
  misc_feature 4: note = <INSDQualifier_value>Abasic Spacer</INSDQualifier_value>
taasgttaaaaacccaaa

SEQ ID NO: 1123 - DNA, 18 bp, synthetic construct
  source 1..18: mol_type = other DNA
  misc_feature 3: note = <INSDQualifier_value>Locked Nucleic Acid</INSDQualifier_value>
  misc_feature 5: note = <INSDQualifier_value>Locked Nucleic Acid</INSDQualifier_value>
  misc_feature 4: note = <INSDQualifier_value>Abasic Spacer</INSDQualifier_value>
  misc_feature 14: note = <INSDQualifier_value>Abasic Spacer</INSDQualifier_value>
taasgttaaaaacscaaa

SEQ ID NO: 1124 - DNA, 18 bp, synthetic construct
  source 1..18: mol_type = other DNA
  misc_feature 9: note = <INSDQualifier_value>Locked Nucleic Acid</INSDQualifier_value>
  misc_feature 11: note = <INSDQualifier_value>Locked Nucleic Acid</INSDQualifier_value>
  misc_feature 10: note = <INSDQualifier_value>Abasic Spacer</INSDQualifier_value>
taaagttaasaacccaaa

SEQ ID NO: 1125 - DNA, 18 bp, synthetic construct
  source 1..18: mol_type = other DNA
  misc_feature 3: note = <INSDQualifier_value>Locked Nucleic Acid</INSDQualifier_value>
  misc_feature 7: note = <INSDQualifier_value>Locked Nucleic Acid</INSDQualifier_value>
  misc_feature 16: note = <INSDQualifier_value>Locked Nucleic Acid</INSDQualifier_value>
taaagttaaaaacccaaa

SEQ ID NO: 1126 - DNA, 18 bp, synthetic construct
  source 1..18: mol_type = other DNA
  misc_feature 7: note = <INSDQualifier_value>Locked Nucleic Acid</INSDQualifier_value>
  misc_feature 9: note = <INSDQualifier_value>Locked Nucleic Acid</INSDQualifier_value>
  misc_feature 8: note = <INSDQualifier_value>Abasic Spacer</INSDQualifier_value>
aattgaasggaaccaaaa

SEQ ID NO: 1127 - DNA, 18 bp, synthetic construct
  source 1..18: mol_type = other DNA
  misc_feature 9: note = <INSDQualifier_value>Locked Nucleic Acid</INSDQualifier_value>
  misc_feature 11: note = <INSDQualifier_value>Locked Nucleic Acid</INSDQualifier_value>
  misc_feature 10: note = <INSDQualifier_value>Abasic Spacer</INSDQualifier_value>
aattgaacgsaaccaaaa

SEQ ID NO: 1128 - DNA, 18 bp, synthetic construct
  source 1..18: mol_type = other DNA
  misc_feature 12: note = <INSDQualifier_value>Locked Nucleic Acid</INSDQualifier_value>
  misc_feature 14: note = <INSDQualifier_value>Locked Nucleic Acid</INSDQualifier_value>
  misc_feature 13: note = <INSDQualifier_value>Abasic Spacer</INSDQualifier_value>
aattgaacggaascaaaa

SEQ ID NO: 1129 - DNA, 18 bp, synthetic construct
  source 1..18: mol_type = other DNA
  misc_feature 5: note = <INSDQualifier_value>Locked Nucleic Acid</INSDQualifier_value>
  misc_feature 7: note = <INSDQualifier_value>Locked Nucleic Acid</INSDQualifier_value>
  misc_feature 6: note = <INSDQualifier_value>Abasic Spacer</INSDQualifier_value>
aattgsacggaaccaaaa

SEQ ID NO: 1130 - DNA, 18 bp, synthetic construct
  source 1..18: mol_type = other DNA
  misc_feature 9: note = <INSDQualifier_value>Locked Nucleic Acid</INSDQualifier_value>
  misc_feature 11: note = <INSDQualifier_value>Locked Nucleic Acid</INSDQualifier_value>
  misc_feature 5: note = <INSDQualifier_value>Abasic Spacer</INSDQualifier_value>
  misc_feature 10: note = <INSDQualifier_value>Abasic Spacer</INSDQualifier_value>
aattsaacgsaaccaaaa

SEQ ID NO: 1131 - DNA, 18 bp, synthetic construct
  source 1..18: mol_type = other DNA
  misc_feature 5: note = <INSDQualifier_value>Locked Nucleic Acid</INSDQualifier_value>
  misc_feature 7: note = <INSDQualifier_value>Locked Nucleic Acid</INSDQualifier_value>
  misc_feature 6: note = <INSDQualifier_value>Abasic Spacer</INSDQualifier_value>
  misc_feature 13: note = <INSDQualifier_value>Abasic Spacer</INSDQualifier_value>
aattgsacggaascaaaa

SEQ ID NO: 1132 - DNA, 18 bp, synthetic construct
  source 1..18: mol_type = other DNA
  misc_feature 2: note = <INSDQualifier_value>Locked Nucleic Acid</INSDQualifier_value>
  misc_feature 11: note = <INSDQualifier_value>Locked Nucleic Acid</INSDQualifier_value>
aattgaacggaaccaaaa

SEQ ID NO: 1133 - DNA, 18 bp, synthetic construct
  source 1..18: mol_type = other DNA
  misc_feature 2: note = <INSDQualifier_value>Locked Nucleic Acid</INSDQualifier_value>
  misc_feature 11: note = <INSDQualifier_value>Locked Nucleic Acid</INSDQualifier_value>
  misc_feature 10: note = <INSDQualifier_value>Abasic Spacer</INSDQualifier_value>
aattgaacgsaaccaaaa

SEQ ID NO: 1134 - DNA, 25 bp, synthetic construct
  source 1..25: mol_type = other DNA
gtaaagttaaaaacccaaattgaac

SEQ ID NO: 1135 - DNA, 25 bp, synthetic construct
  source 1..25: mol_type = other DNA
ttaaagttaaaaacccaaattgaac

SEQ ID NO: 1136 - DNA, 25 bp, synthetic construct
  source 1..25: mol_type = other DNA
gtaaagttaaaaatccaaattgaac

SEQ ID NO: 1137 - DNA, 25 bp, synthetic construct
  source 1..25: mol_type = other DNA
gtaaagttaaaaactcaaattgaac

SEQ ID NO: 1138 - DNA, 25 bp, synthetic construct
  source 1..25: mol_type = other DNA
gtaaagttaaaaacctaaattgaac

SEQ ID NO: 1139 - DNA, 25 bp, synthetic construct
  source 1..25: mol_type = other DNA
gtaaagttaaaaacccaaatttaac

SEQ ID NO: 1140 - DNA, 25 bp, synthetic construct
  source 1..25: mol_type = other DNA
gtaaagttaaaaacccaaattgaat

SEQ ID NO: 1141 - DNA, 25 bp, synthetic construct
  source 1..25: mol_type = other DNA
gtaaatttaaaaacccaaattgaac

SEQ ID NO: 1142 - DNA, 25 bp, synthetic construct
  source 1..25: mol_type = other DNA
ataaaattaaaaacccaaattgaac

SEQ ID NO: 1143 - DNA, 25 bp, synthetic construct
  source 1..25: mol_type = other DNA
gtaaagttaaaaacccaaattaaac

SEQ ID NO: 1144 - DNA, 25 bp, synthetic construct
  source 1..25: mol_type = other DNA
gtaaaattaaaaacccaaattaaac

SEQ ID NO: 1145 - DNA, 25 bp, synthetic construct
  source 1..25: mol_type = other DNA
tgtaaagttaaaaatccaaattgaa

SEQ ID NO: 1146 - DNA, 25 bp, synthetic construct
  source 1..25: mol_type = other DNA
tgtaaagttaaaaactcaaattgaa

SEQ ID NO: 1147 - DNA, 25 bp, synthetic construct
  source 1..25: mol_type = other DNA
tgtaaagttaaaaacctaaattgaa

SEQ ID NO: 1148 - DNA, 25 bp, synthetic construct
  source 1..25: mol_type = other DNA
tttaaagttaaaaacccaaattgaa

SEQ ID NO: 1149 - DNA, 25 bp, synthetic construct
  source 1..25: mol_type = other DNA
tgtaaagttaaaaacccaaatttaa

SEQ ID NO: 1150 - DNA, 25 bp, synthetic construct
  source 1..25: mol_type = other DNA
tgtaaatttaaaaacccaaattgaa

SEQ ID NO: 1151 - DNA, 25 bp, synthetic construct
  source 1..25: mol_type = other DNA
tgtaaagttaaaaacccaaattaaa

SEQ ID NO: 1152 - DNA, 25 bp, synthetic construct
  source 1..25: mol_type = other DNA
tgtaaaattaaaaacccaaattaaa

SEQ ID NO: 1153 - DNA, 25 bp, synthetic construct
  source 1..25: mol_type = other DNA
ctgtaaagttaaaaacccaaattga

SEQ ID NO: 1154 - DNA, 25 bp, synthetic construct
  source 1..25: mol_type = other DNA
ttgtaaagttaaaaacccaaattga

SEQ ID NO: 1155 - DNA, 25 bp, synthetic construct
  source 1..25: mol_type = other DNA
ctgtaaagttaaaaatccaaattga

SEQ ID NO: 1156 - DNA, 25 bp, synthetic construct
  source 1..25: mol_type = other DNA
ctgtaaagttaaaaactcaaattga

SEQ ID NO: 1157 - DNA, 25 bp, synthetic construct
  source 1..25: mol_type = other DNA
ctgtaaagttaaaaacctaaattga

SEQ ID NO: 1158 - DNA, 25 bp, synthetic construct
  source 1..25: mol_type = other DNA
ctgtaaagttaaaaacccaaattta

SEQ ID NO: 1159 - DNA, 25 bp, synthetic construct
  source 1..25: mol_type = other DNA
ctttaaagttaaaaacccaaattga

SEQ ID NO: 1160 - DNA, 25 bp, synthetic construct
  source 1..25: mol_type = other DNA
ctgtaaatttaaaaacccaaattga

SEQ ID NO: 1161 - DNA, 25 bp, synthetic construct
  source 1..25: mol_type = other DNA
ctgtaaagttaaaaacccaaattaa

SEQ ID NO: 1162 - DNA, 25 bp, synthetic construct
  source 1..25: mol_type = other DNA
ctgtaaaattaaaaacccaaattaa

SEQ ID NO: 1163 - DNA, 25 bp, synthetic construct
  source 1..25: mol_type = other DNA
tctgtaaagttaaaaacccaaattg

SEQ ID NO: 1164 - DNA, 25 bp, synthetic construct
  source 1..25: mol_type = other DNA
cctgtaaagttaaaaatccaaattg

SEQ ID NO: 1165 - DNA, 25 bp, synthetic construct
  source 1..25: mol_type = other DNA
cctgtaaagttaaaaactcaaattg

SEQ ID NO: 1166 - DNA, 25 bp, synthetic construct
  source 1..25: mol_type = other DNA
cctgtaaagttaaaaacctaaattg

SEQ ID NO: 1167 - DNA, 25 bp, synthetic construct
  source 1..25: mol_type = other DNA
cttgtaaagttaaaaacccaaattg

SEQ ID NO: 1168 - DNA, 25 bp, synthetic construct
  source 1..25: mol_type = other DNA
cctttaaagttaaaaacccaaattg

SEQ ID NO: 1169 - DNA, 25 bp, synthetic construct
  source 1..25: mol_type = other DNA
cctgtaaatttaaaaacccaaattg

SEQ ID NO: 1170 - DNA, 25 bp, synthetic construct
  source 1..25: mol_type = other DNA
cctgtaaagttaaaaacccaaatta

SEQ ID NO: 1171 - DNA, 25 bp, synthetic construct
  source 1..25: mol_type = other DNA
cctgtaaaattaaaaacccaaatta

SEQ ID NO: 1172 - DNA, 25 bp, synthetic construct
  source 1..25: mol_type = other DNA
tcctgtaaagttaaaaacccaaatt

SEQ ID NO: 1173 - DNA, 25 bp, synthetic construct
  source 1..25: mol_type = other DNA
ccctgtaaatttaaaaacccaaatt

SEQ ID NO: 1174 - DNA, 25 bp, synthetic construct
  source 1..25: mol_type = other DNA
ccctgtaaagttaaaaatccaaatt

SEQ ID NO: 1175 - DNA, 25 bp, synthetic construct
  source 1..25: mol_type = other DNA
ccctgtaaagttaaaaactcaaatt

SEQ ID NO: 1176 - DNA, 25 bp, synthetic construct
  source 1..25: mol_type = other DNA
ctctgtaaagttaaaaacccaaatt

SEQ ID NO: 1177 - DNA, 25 bp, synthetic construct
  source 1..25: mol_type = other DNA
ccctgtaaagttaaaaacctaaatt

SEQ ID NO: 1178 - DNA, 25 bp, synthetic construct
  source 1..25: mol_type = other DNA
ccttgtaaagttaaaaacccaaatt

SEQ ID NO: 1179 - DNA, 25 bp, synthetic construct
  source 1..25: mol_type = other DNA
ccctttaaagttaaaaacccaaatt

SEQ ID NO: 1180 - DNA, 25 bp, synthetic construct
  source 1..25: mol_type = other DNA
ccctgtaaaattaaaaacccaaatt

SEQ ID NO: 1181 - DNA, 25 bp, synthetic construct
  source 1..25: mol_type = other DNA
ccctataaaattaaaaacccaaatt

SEQ ID NO: 1182 - DNA, 25 bp, synthetic construct
  source 1..25: mol_type = other DNA
accctgtaaagttaaaaacccaaat

SEQ ID NO: 1183 - DNA, 25 bp, synthetic construct
  source 1..25: mol_type = other DNA
accctgtaaatttaaaaacccaaat

SEQ ID NO: 1184 - DNA, 25 bp, synthetic construct
  source 1..25: mol_type = other DNA
accctgtaaagttaaaaatccaaat

SEQ ID NO: 1185 - DNA, 25 bp, synthetic construct
  source 1..25: mol_type = other DNA
atcctgtaaagttaaaaacccaaat

SEQ ID NO: 1186 - DNA, 25 bp, synthetic construct
  source 1..25: mol_type = other DNA
accctgtaaagttaaaaactcaaat

SEQ ID NO: 1187 - DNA, 25 bp, synthetic construct
  source 1..25: mol_type = other DNA
accctgtaaagttaaaaacctaaat

SEQ ID NO: 1188 - DNA, 25 bp, synthetic construct
  source 1..25: mol_type = other DNA
actctgtaaagttaaaaacccaaat

SEQ ID NO: 1189 - DNA, 25 bp, synthetic construct
  source 1..25: mol_type = other DNA
accttgtaaagttaaaaacccaaat

SEQ ID NO: 1190 - DNA, 25 bp, synthetic construct
  source 1..25: mol_type = other DNA
accctttaaagttaaaaacccaaat

SEQ ID NO: 1191 - DNA, 25 bp, synthetic construct
  source 1..25: mol_type = other DNA
accctgtaaaattaaaaacccaaat

SEQ ID NO: 1192 - DNA, 25 bp, synthetic construct
  source 1..25: mol_type = other DNA
accctataaaattaaaaacccaaat

SEQ ID NO: 1193 - DNA, 25 bp, synthetic construct
  source 1..25: mol_type = other DNA
gaccctgtaaagttaaaaacccaaa

SEQ ID NO: 1194 - DNA, 25 bp, synthetic construct
  source 1..25: mol_type = other DNA
taccctgtaaagttaaaaacccaaa

SEQ ID NO: 1195 - DNA, 25 bp, synthetic construct
  source 1..25: mol_type = other DNA
gaccctgtaaatttaaaaacccaaa

SEQ ID NO: 1196 - DNA, 25 bp, synthetic construct
  source 1..25: mol_type = other DNA
gaccctgtaaagttaaaaatccaaa

SEQ ID NO: 1197 - DNA, 25 bp, synthetic construct
  source 1..25: mol_type = other DNA
gaccctgtaaagttaaaaactcaaa

SEQ ID NO: 1198 - DNA, 25 bp, synthetic construct
  source 1..25: mol_type = other DNA
gaccctgtaaagttaaaaacctaaa

SEQ ID NO: 1199 - DNA, 25 bp, synthetic construct
  source 1..25: mol_type = other DNA
gatcctgtaaagttaaaaacccaaa

SEQ ID NO: 1200 - DNA, 25 bp, synthetic construct
  source 1..25: mol_type = other DNA
gactctgtaaagttaaaaacccaaa

SEQ ID NO: 1201 - DNA, 25 bp, synthetic construct
  source 1..25: mol_type = other DNA
gaccttgtaaagttaaaaacccaaa

SEQ ID NO: 1202 - DNA, 25 bp, synthetic construct
  source 1..25: mol_type = other DNA
gaccctttaaagttaaaaacccaaa

SEQ ID NO: 1203 - DNA, 25 bp, synthetic construct
  source 1..25: mol_type = other DNA
gaccctgtaaaattaaaaacccaaa

SEQ ID NO: 1204 - DNA, 25 bp, synthetic construct
  source 1..25: mol_type = other DNA
gaccctataaaattaaaaacccaaa

SEQ ID NO: 1205 - DNA, 25 bp, synthetic construct
  source 1..25: mol_type = other DNA
tgaccctgtaaatttaaaaacccaa

SEQ ID NO: 1206 - DNA, 25 bp, synthetic construct
  source 1..25: mol_type = other DNA
ttaccctgtaaagttaaaaacccaa

SEQ ID NO: 1207 - DNA, 25 bp, synthetic construct
  source 1..25: mol_type = other DNA
tgaccctgtaaagttaaaaatccaa

SEQ ID NO: 1208 - DNA, 25 bp, synthetic construct
  source 1..25: mol_type = other DNA
tgaccctgtaaagttaaaaactcaa

SEQ ID NO: 1209 - DNA, 25 bp, synthetic construct
  source 1..25: mol_type = other DNA
tgaccctgtaaagttaaaaacctaa

SEQ ID NO: 1210 - DNA, 25 bp, synthetic construct
  source 1..25: mol_type = other DNA
tgatcctgtaaagttaaaaacccaa

SEQ ID NO: 1211 - DNA, 25 bp, synthetic construct
  source 1..25: mol_type = other DNA
tgactctgtaaagttaaaaacccaa

SEQ ID NO: 1212 - DNA, 25 bp, synthetic construct
  source 1..25: mol_type = other DNA
tgaccttgtaaagttaaaaacccaa

SEQ ID NO: 1213 - DNA, 25 bp, synthetic construct
  source 1..25: mol_type = other DNA
tgaccctttaaagttaaaaacccaa

SEQ ID NO: 1214 - DNA, 25 bp, synthetic construct
  source 1..25: mol_type = other DNA
taaccctgtaaaattaaaaacccaa

SEQ ID NO: 1215 - DNA, 25 bp, synthetic construct
  source 1..25: mol_type = other DNA
tgaccctgtaaaattaaaaacccaa

SEQ ID NO: 1216 - DNA, 25 bp, synthetic construct
  source 1..25: mol_type = other DNA
tgaccctataaaattaaaaacccaa

SEQ ID NO: 1217 - DNA, 25 bp, synthetic construct
  source 1..25: mol_type = other DNA
ctgaccctgtaaagttaaaaaccca

SEQ ID NO: 1218 - DNA, 25 bp, synthetic construct
  source 1..25: mol_type = other DNA
ttgaccctgtaaagttaaaaaccca

SEQ ID NO: 1219 - DNA, 25 bp, synthetic construct
  source 1..25: mol_type = other DNA
ctgaccctgtaaatttaaaaaccca

SEQ ID NO: 1220 - DNA, 25 bp, synthetic construct
  source 1..25: mol_type = other DNA
ctgaccctgtaaagttaaaaatcca

SEQ ID NO: 1221 - DNA, 25 bp, synthetic construct
  source 1..25: mol_type = other DNA
ctgaccctgtaaagttaaaaactca

SEQ ID NO: 1222 - DNA, 25 bp, synthetic construct
  source 1..25: mol_type = other DNA
ctgaccctgtaaagttaaaaaccta

SEQ ID NO: 1223 - DNA, 25 bp, synthetic construct
  source 1..25: mol_type = other DNA
cttaccctgtaaagttaaaaaccca

SEQ ID NO: 1224 - DNA, 25 bp, synthetic construct
  source 1..25: mol_type = other DNA
ctgatcctgtaaagttaaaaaccca

SEQ ID NO: 1225 - DNA, 25 bp, synthetic construct
  source 1..25: mol_type = other DNA
ctgactctgtaaagttaaaaaccca

SEQ ID NO: 1226 - DNA, 25 bp, synthetic construct
  source 1..25: mol_type = other DNA
ctgaccttgtaaagttaaaaaccca

SEQ ID NO: 1227 - DNA, 25 bp, synthetic construct
  source 1..25: mol_type = other DNA
ctgaccctttaaagttaaaaaccca

SEQ ID NO: 1228 - DNA, 25 bp, synthetic construct
  source 1..25: mol_type = other DNA
ctaaccctgtaaaattaaaaaccca

SEQ ID NO: 1229 - DNA, 25 bp, synthetic construct
  source 1..25: mol_type = other DNA
ctgaccctgtaaaattaaaaaccca

SEQ ID NO: 1230 - DNA, 25 bp, synthetic construct
  source 1..25: mol_type = other DNA
ctgaccctataaaattaaaaaccca

SEQ ID NO: 1231 - DNA, 25 bp, synthetic construct
  source 1..25: mol_type = other DNA
actgaccctgtaaagttaaaaaccc

SEQ ID NO: 1232 - DNA, 25 bp, synthetic construct
  source 1..25: mol_type = other DNA
actgaccctttaaagttaaaaaccc

SEQ ID NO: 1233 - DNA, 25 bp, synthetic construct
  source 1..25: mol_type = other DNA
actgaccctgtaaatttaaaaaccc

SEQ ID NO: 1234 - DNA, 25 bp, synthetic construct
  source 1..25: mol_type = other DNA
attgaccctgtaaagttaaaaaccc

SEQ ID NO: 1235 - DNA, 25 bp, synthetic construct
  source 1..25: mol_type = other DNA
actgaccctgtaaagttaaaaatcc

SEQ ID NO: 1236 - DNA, 25 bp, synthetic construct
  source 1..25: mol_type = other DNA
actgaccctgtaaagttaaaaactc

SEQ ID NO: 1237 - DNA, 25 bp, synthetic construct
  source 1..25: mol_type = other DNA
actgaccctgtaaagttaaaaacct

SEQ ID NO: 1238 - DNA, 25 bp, synthetic construct
  source 1..25: mol_type = other DNA
acttaccctgtaaagttaaaaaccc

SEQ ID NO: 1239 - DNA, 25 bp, synthetic construct
  source 1..25: mol_type = other DNA
actgatcctgtaaagttaaaaaccc

SEQ ID NO: 1240 - DNA, 25 bp, synthetic construct
  source 1..25: mol_type = other DNA
actgactctgtaaagttaaaaaccc

SEQ ID NO: 1241 - DNA, 25 bp, synthetic construct
  source 1..25: mol_type = other DNA
actgaccttgtaaagttaaaaaccc

SEQ ID NO: 1242 - DNA, 25 bp, synthetic construct
  source 1..25: mol_type = other DNA
actaaccctgtaaaattaaaaaccc

SEQ ID NO: 1243 - DNA, 25 bp, synthetic construct
  source 1..25: mol_type = other DNA
actgaccctgtaaaattaaaaaccc

SEQ ID NO: 1244 - DNA, 25 bp, synthetic construct
  source 1..25: mol_type = other DNA
actgaccctataaaattaaaaaccc

SEQ ID NO: 1245 - DNA, 25 bp, synthetic construct
  source 1..25: mol_type = other DNA
aactgaccctttaaagttaaaaacc

SEQ ID NO: 1246 - DNA, 25 bp, synthetic construct
  source 1..25: mol_type = other DNA
aactgaccctgtaaatttaaaaacc

SEQ ID NO: 1247 - DNA, 25 bp, synthetic construct
  source 1..25: mol_type = other DNA
aactgaccctgtaaagttaaaaatc

SEQ ID NO: 1248 - DNA, 25 bp, synthetic construct
  source 1..25: mol_type = other DNA
aactgaccctgtaaagttaaaaact

SEQ ID NO: 1249 - DNA, 25 bp, synthetic construct
  source 1..25: mol_type = other DNA
aattgaccctgtaaagttaaaaacc

SEQ ID NO: 1250 - DNA, 25 bp, synthetic construct
  source 1..25: mol_type = other DNA
aacttaccctgtaaagttaaaaacc

SEQ ID NO: 1251 - DNA, 25 bp, synthetic construct
  source 1..25: mol_type = other DNA
aactgatcctgtaaagttaaaaacc

SEQ ID NO: 1252 - DNA, 25 bp, synthetic construct
  source 1..25: mol_type = other DNA
aactgactctgtaaagttaaaaacc

SEQ ID NO: 1253 - DNA, 25 bp, synthetic construct
  source 1..25: mol_type = other DNA
aactgaccttgtaaagttaaaaacc

SEQ ID NO: 1254 - DNA, 25 bp, synthetic construct
  source 1..25: mol_type = other DNA
aactaaccctgtaaaattaaaaacc

SEQ ID NO: 1255 - DNA, 25 bp, synthetic construct
  source 1..25: mol_type = other DNA
aactgaccctgtaaaattaaaaacc

SEQ ID NO: 1256 - DNA, 25 bp, synthetic construct
  source 1..25: mol_type = other DNA
aactgaccctataaaattaaaaacc

SEQ ID NO: 1257 - DNA, 25 bp, synthetic construct
  source 1..25: mol_type = other DNA
gaactgaccctgtaaagttaaaaac

SEQ ID NO: 1258 - DNA, 25 bp, synthetic construct
  source 1..25: mol_type = other DNA
taactgaccctgtaaagttaaaaac

SEQ ID NO: 1259 - DNA, 25 bp, synthetic construct
  source 1..25: mol_type = other DNA
gaactgaccttgtaaagttaaaaac

SEQ ID NO: 1260 - DNA, 25 bp, synthetic construct
  source 1..25: mol_type = other DNA
gaactgaccctttaaagttaaaaac

SEQ ID NO: 1261 - DNA, 25 bp, synthetic construct
  source 1..25: mol_type = other DNA
gaactgaccctgtaaatttaaaaac

SEQ ID NO: 1262 - DNA, 25 bp, synthetic construct
  source 1..25: mol_type = other DNA
gaactgaccctgtaaagttaaaaat

SEQ ID NO: 1263 - DNA, 25 bp, synthetic construct
  source 1..25: mol_type = other DNA
gaattgaccctgtaaagttaaaaac

SEQ ID NO: 1264 - DNA, 25 bp, synthetic construct
  source 1..25: mol_type = other DNA
gaacttaccctgtaaagttaaaaac

SEQ ID NO: 1265 - DNA, 25 bp, synthetic construct
  source 1..25: mol_type = other DNA
gaactgatcctgtaaagttaaaaac

SEQ ID NO: 1266 - DNA, 25 bp, synthetic construct
  source 1..25: mol_type = other DNA
gaactgactctgtaaagttaaaaac

SEQ ID NO: 1267 - DNA, 25 bp, synthetic construct
  source 1..25: mol_type = other DNA
aaactgaccctataaagttaaaaac

SEQ ID NO: 1268 - DNA, 25 bp, synthetic construct
  source 1..25: mol_type = other DNA
aaactgaccctgtaaaattaaaaac

SEQ ID NO: 1269 - DNA, 25 bp, synthetic construct
  source 1..25: mol_type = other DNA
aaactaaccctgtaaagttaaaaac

SEQ ID NO: 1270 - DNA, 25 bp, synthetic construct
  source 1..25: mol_type = other DNA
gaactaaccctgtaaaattaaaaac

SEQ ID NO: 1271 - DNA, 25 bp, synthetic construct
  source 1..25: mol_type = other DNA
gaactgaccctgtaaaattaaaaac

SEQ ID NO: 1272 - DNA, 25 bp, synthetic construct
  source 1..25: mol_type = other DNA
gaactgaccctataaaattaaaaac

SEQ ID NO: 1273 - DNA, 25 bp, synthetic construct
  source 1..25: mol_type = other DNA
ggaactgaccctgtaaagttaaaaa

SEQ ID NO: 1274 - DNA, 25 bp, synthetic construct
  source 1..25: mol_type = other DNA
tgaactgaccctgtaaagttaaaaa

SEQ ID NO: 1275 - DNA, 25 bp, synthetic construct
  source 1..25: mol_type = other DNA
ggaactgactctgtaaagttaaaaa

SEQ ID NO: 1276 - DNA, 25 bp, synthetic construct
  source 1..25: mol_type = other DNA
ggaactgaccttgtaaagttaaaaa

SEQ ID NO: 1277 - DNA, 25 bp, synthetic construct
  source 1..25: mol_type = other DNA
ggaactgaccctttaaagttaaaaa

SEQ ID NO: 1278 - DNA, 25 bp, synthetic construct
  source 1..25: mol_type = other DNA
ggaactgaccctgtaaatttaaaaa

SEQ ID NO: 1279 - DNA, 25 bp, synthetic construct
  source 1..25: mol_type = other DNA
gtaactgaccctgtaaagttaaaaa

SEQ ID NO: 1280 - DNA, 25 bp, synthetic construct
  source 1..25: mol_type = other DNA
ggaattgaccctgtaaagttaaaaa

SEQ ID NO: 1281 - DNA, 25 bp, synthetic construct
  source 1..25: mol_type = other DNA
ggaacttaccctgtaaagttaaaaa

SEQ ID NO: 1282 - DNA, 25 bp, synthetic construct
  source 1..25: mol_type = other DNA
ggaactgatcctgtaaagttaaaaa

SEQ ID NO: 1283 - DNA, 25 bp, synthetic construct
  source 1..25: mol_type = other DNA
agaactgaccctataaagttaaaaa

SEQ ID NO: 1284 - DNA, 25 bp, synthetic construct
  source 1..25: mol_type = other DNA
agaactgaccctgtaaaattaaaaa

SEQ ID NO: 1285 - DNA, 25 bp, synthetic construct
  source 1..25: mol_type = other DNA
aaaactgaccctgtaaagttaaaaa

SEQ ID NO: 1286 - DNA, 25 bp, synthetic construct
  source 1..25: mol_type = other DNA
agaactaaccctgtaaagttaaaaa

SEQ ID NO: 1287 - DNA, 25 bp, synthetic construct
  source 1..25: mol_type = other DNA
gaaactgaccctataaagttaaaaa

SEQ ID NO: 1288 - DNA, 25 bp, synthetic construct
  source 1..25: mol_type = other DNA
gaaactgaccctgtaaaattaaaaa

SEQ ID NO: 1289 - DNA, 25 bp, synthetic construct
  source 1..25: mol_type = other DNA
gaaactaaccctgtaaagttaaaaa

SEQ ID NO: 1290 - DNA, 25 bp, synthetic construct
  source 1..25: mol_type = other DNA
ggaactaaccctgtaaaattaaaaa

SEQ ID NO: 1291 - DNA, 25 bp, synthetic construct
  source 1..25: mol_type = other DNA
ggaactgaccctgtaaaattaaaaa

SEQ ID NO: 1292 - DNA, 25 bp, synthetic construct
  source 1..25: mol_type = other DNA
ggaactgaccctataaaattaaaaa

SEQ ID NO: 1293 - DNA, 25 bp, synthetic construct
  source 1..25: mol_type = other DNA
tggaactgaccctgtaaagttaaaa

SEQ ID NO: 1294 - DNA, 25 bp, synthetic construct
  source 1..25: mol_type = other DNA
cggaactgatcctgtaaagttaaaa

SEQ ID NO: 1295 - DNA, 25 bp, synthetic construct
  source 1..25: mol_type = other DNA
cggaactgactctgtaaagttaaaa

SEQ ID NO: 1296 - DNA, 25 bp, synthetic construct
  source 1..25: mol_type = other DNA
cggaactgaccttgtaaagttaaaa

SEQ ID NO: 1297 - DNA, 25 bp, synthetic construct
  source 1..25: mol_type = other DNA
cggaactgaccctttaaagttaaaa

SEQ ID NO: 1298 - DNA, 25 bp, synthetic construct
  source 1..25: mol_type = other DNA
cggaactgaccctgtaaatttaaaa

SEQ ID NO: 1299 - DNA, 25 bp, synthetic construct
  source 1..25: mol_type = other DNA
ctgaactgaccctgtaaagttaaaa

SEQ ID NO: 1300 - DNA, 25 bp, synthetic construct
  source 1..25: mol_type = other DNA
cgtaactgaccctgtaaagttaaaa

SEQ ID NO: 1301 - DNA, 25 bp, synthetic construct
  source 1..25: mol_type = other DNA
cggaattgaccctgtaaagttaaaa

SEQ ID NO: 1302 - DNA, 25 bp, synthetic construct
  source 1..25: mol_type = other DNA
cggaacttaccctgtaaagttaaaa

SEQ ID NO: 1303 - DNA, 25 bp, synthetic construct
  source 1..25: mol_type = other DNA
cagaactgaccctataaagttaaaa

SEQ ID NO: 1304 - DNA, 25 bp, synthetic construct
  source 1..25: mol_type = other DNA
cagaactgaccctgtaaaattaaaa

SEQ ID NO: 1305 - DNA, 25 bp, synthetic construct
  source 1..25: mol_type = other DNA
caaaactgaccctgtaaagttaaaa

SEQ ID NO: 1306 - DNA, 25 bp, synthetic construct
  source 1..25: mol_type = other DNA
cagaactaaccctgtaaagttaaaa

SEQ ID NO: 1307 - DNA, 25 bp, synthetic construct
  source 1..25: mol_type = other DNA
cgaaactgaccctataaagttaaaa

SEQ ID NO: 1308 - DNA, 25 bp, synthetic construct
  source 1..25: mol_type = other DNA
cgaaactgaccctgtaaaattaaaa

SEQ ID NO: 1309 - DNA, 25 bp, synthetic construct
  source 1..25: mol_type = other DNA
cgaaactaaccctgtaaagttaaaa

SEQ ID NO: 1310 - DNA, 25 bp, synthetic construct
  source 1..25: mol_type = other DNA
cggaactaaccctgtaaaattaaaa

SEQ ID NO: 1311 - DNA, 25 bp, synthetic construct
  source 1..25: mol_type = other DNA
cggaactgaccctgtaaaattaaaa

SEQ ID NO: 1312 - DNA, 25 bp, synthetic construct
  source 1..25: mol_type = other DNA
cggaactgaccctataaaattaaaa

SEQ ID NO: 1313 - DNA, 25 bp, synthetic construct
  source 1..25: mol_type = other DNA
gcggaactgaccctgtaaagttaaa

SEQ ID NO: 1314 - DNA, 25 bp, synthetic construct
  source 1..25: mol_type = other DNA
tcggaactgaccctgtaaagttaaa

SEQ ID NO: 1315 - DNA, 25 bp, synthetic construct
  source 1..25: mol_type = other DNA
gcggaactgatcctgtaaagttaaa

SEQ ID NO: 1316 - DNA, 25 bp, synthetic construct
  source 1..25: mol_type = other DNA
gcggaactgactctgtaaagttaaa

SEQ ID NO: 1317 - DNA, 25 bp, synthetic construct
  source 1..25: mol_type = other DNA
gcggaactgaccttgtaaagttaaa

SEQ ID NO: 1318 - DNA, 25 bp, synthetic construct
  source 1..25: mol_type = other DNA
gcggaactgaccctttaaagttaaa

SEQ ID NO: 1319 - DNA, 25 bp, synthetic construct
  source 1..25: mol_type = other DNA
gtggaactgaccctgtaaagttaaa

SEQ ID NO: 1320 - DNA, 25 bp, synthetic construct
  source 1..25: mol_type = other DNA
gcggaactgaccctgtaaatttaaa

SEQ ID NO: 1321 - DNA, 25 bp, synthetic construct
  source 1..25: mol_type = other DNA
gctgaactgaccctgtaaagttaaa

SEQ ID NO: 1322 - DNA, 25 bp, synthetic construct
  source 1..25: mol_type = other DNA
gcgtaactgaccctgtaaagttaaa

SEQ ID NO: 1323 - DNA, 25 bp, synthetic construct
  source 1..25: mol_type = other DNA
gcggaattgaccctgtaaagttaaa

SEQ ID NO: 1324 - DNA, 25 bp, synthetic construct
  source 1..25: mol_type = other DNA
gcggaacttaccctgtaaagttaaa

SEQ ID NO: 1325 - DNA, 25 bp, synthetic construct
  source 1..25: mol_type = other DNA
acggaactgaccctataaagttaaa

SEQ ID NO: 1326 - DNA, 25 bp, synthetic construct
  source 1..25: mol_type = other DNA
acggaactgaccctgtaaaattaaa

SEQ ID NO: 1327 - DNA, 25 bp, synthetic construct
  source 1..25: mol_type = other DNA
acagaactgaccctgtaaagttaaa

SEQ ID NO: 1328 - DNA, 25 bp, synthetic construct
  source 1..25: mol_type = other DNA
acgaaactgaccctgtaaagttaaa

SEQ ID NO: 1329 - DNA, 25 bp, synthetic construct
  source 1..25: mol_type = other DNA
acggaactaaccctgtaaagttaaa

SEQ ID NO: 1330 - DNA, 25 bp, synthetic construct
  source 1..25: mol_type = other DNA
gcagaactgaccctataaagttaaa

SEQ ID NO: 1331 - DNA, 25 bp, synthetic construct
  source 1..25: mol_type = other DNA
gcagaactgaccctgtaaaattaaa

SEQ ID NO: 1332 - DNA, 25 bp, synthetic construct
  source 1..25: mol_type = other DNA
gcaaaactgaccctgtaaagttaaa

SEQ ID NO: 1333 - DNA, 25 bp, synthetic construct
  source 1..25: mol_type = other DNA
gcagaactaaccctgtaaagttaaa

SEQ ID NO: 1334 - DNA, 25 bp, synthetic construct
  source 1..25: mol_type = other DNA
gcgaaactgaccctataaagttaaa

SEQ ID NO: 1335 - DNA, 25 bp, synthetic construct
  source 1..25: mol_type = other DNA
gcgaaactgaccctgtaaaattaaa

SEQ ID NO: 1336 - DNA, 25 bp, synthetic construct
  source 1..25: mol_type = other DNA
gcgaaactaaccctgtaaagttaaa

SEQ ID NO: 1337 - DNA, 25 bp, synthetic construct
  source 1..25: mol_type = other DNA
gcggaactaaccctgtaaaattaaa

SEQ ID NO: 1338 - DNA, 25 bp, synthetic construct
  source 1..25: mol_type = other DNA
gcggaactgaccctgtaaaattaaa

SEQ ID NO: 1339 - DNA, 25 bp, synthetic construct
  source 1..25: mol_type = other DNA
gcggaactgaccctataaaattaaa

SEQ ID NO: 1340 - DNA, 25 bp, synthetic construct
  source 1..25: mol_type = other DNA
agcggaactgaccctgtaaagttaa

SEQ ID NO: 1341 - DNA, 25 bp, synthetic construct
  source 1..25: mol_type = other DNA
agcggaacttaccctgtaaagttaa

SEQ ID NO: 1342 - DNA, 25 bp, synthetic construct
  source 1..25: mol_type = other DNA
agcggaactgatcctgtaaagttaa

SEQ ID NO: 1343 - DNA, 25 bp, synthetic construct
  source 1..25: mol_type = other DNA
agcggaactgactctgtaaagttaa

SEQ ID NO: 1344 - DNA, 25 bp, synthetic construct
  source 1..25: mol_type = other DNA
agcggaactgaccttgtaaagttaa

SEQ ID NO: 1345 - DNA, 25 bp, synthetic construct
  source 1..25: mol_type = other DNA
agcggaactgaccctttaaagttaa

SEQ ID NO: 1346 - DNA, 25 bp, synthetic construct
  source 1..25: mol_type = other DNA
atcggaactgaccctgtaaagttaa

SEQ ID NO: 1347 - DNA, 25 bp, synthetic construct
  source 1..25: mol_type = other DNA
agcggaactgaccctgtaaatttaa

SEQ ID NO: 1348 - DNA, 25 bp, synthetic construct
  source 1..25: mol_type = other DNA
agtggaactgaccctgtaaagttaa

SEQ ID NO: 1349 - DNA, 25 bp, synthetic construct
  source 1..25: mol_type = other DNA
agctgaactgaccctgtaaagttaa

SEQ ID NO: 1350 - DNA, 25 bp, synthetic construct
  source 1..25: mol_type = other DNA
agcgtaactgaccctgtaaagttaa

SEQ ID NO: 1351 - DNA, 25 bp, synthetic construct
  source 1..25: mol_type = other DNA
agcggaattgaccctgtaaagttaa

SEQ ID NO: 1352 - DNA, 25 bp, synthetic construct
  source 1..25: mol_type = other DNA
agcggaactaaccctgtaaaattaa

SEQ ID NO: 1353 - DNA, 25 bp, synthetic construct
  source 1..25: mol_type = other DNA
aacggaactaaccctgtaaagttaa

SEQ ID NO: 1354 - DNA, 25 bp, synthetic construct
  source 1..25: mol_type = other DNA
aacggaactgaccctataaagttaa

SEQ ID NO: 1355 - DNA, 25 bp, synthetic construct
  source 1..25: mol_type = other DNA
aacggaactgaccctgtaaaattaa

SEQ ID NO: 1356 - DNA, 25 bp, synthetic construct
  source 1..25: mol_type = other DNA
aacagaactgaccctgtaaagttaa

SEQ ID NO: 1357 - DNA, 25 bp, synthetic construct
  source 1..25: mol_type = other DNA
aacgaaactgaccctgtaaagttaa

SEQ ID NO: 1358 - DNA, 25 bp, synthetic construct
  source 1..25: mol_type = other DNA
agcagaactaaccctgtaaagttaa

SEQ ID NO: 1359 - DNA, 25 bp, synthetic construct
  source 1..25: mol_type = other DNA
agcagaactgaccctataaagttaa

SEQ ID NO: 1360 - DNA, 25 bp, synthetic construct
  source 1..25: mol_type = other DNA
agcagaactgaccctgtaaaattaa

SEQ ID NO: 1361 - DNA, 25 bp, synthetic construct
  source 1..25: mol_type = other DNA
agcaaaactgaccctgtaaagttaa

SEQ ID NO: 1362 - DNA, 25 bp, synthetic construct
  source 1..25: mol_type = other DNA
agcgaaactaaccctgtaaagttaa

SEQ ID NO: 1363 - DNA, 25 bp, synthetic construct
  source 1..25: mol_type = other DNA
agcgaaactgaccctataaagttaa

SEQ ID NO: 1364 - DNA, 25 bp, synthetic construct
  source 1..25: mol_type = other DNA
agcgaaactgaccctgtaaaattaa

SEQ ID NO: 1365 - DNA, 25 bp, synthetic construct
  source 1..25: mol_type = other DNA
agcggaactgaccctgtaaaattaa

SEQ ID NO: 1366 - DNA, 25 bp, synthetic construct
  source 1..25: mol_type = other DNA
agcggaactgaccctataaaattaa

SEQ ID NO: 1367 - DNA, 25 bp, synthetic construct
  source 1..25: mol_type = other DNA
aagcggaacttaccctgtaaagtta

SEQ ID NO: 1368 - DNA, 25 bp, synthetic construct
  source 1..25: mol_type = other DNA
aagcggaactgatcctgtaaagtta

SEQ ID NO: 1369 - DNA, 25 bp, synthetic construct
  source 1..25: mol_type = other DNA
aagcggaactgactctgtaaagtta

SEQ ID NO: 1370 - DNA, 25 bp, synthetic construct
  source 1..25: mol_type = other DNA
aagcggaactgaccttgtaaagtta

SEQ ID NO: 1371 - DNA, 25 bp, synthetic construct
  source 1..25: mol_type = other DNA
aagcggaactgaccctttaaagtta

SEQ ID NO: 1372 - DNA, 25 bp, synthetic construct
  source 1..25: mol_type = other DNA
aagcggaactgaccctgtaaattta

SEQ ID NO: 1373 - DNA, 25 bp, synthetic construct
  source 1..25: mol_type = other DNA
aatcggaactgaccctgtaaagtta

SEQ ID NO: 1374 - DNA, 25 bp, synthetic construct
  source 1..25: mol_type = other DNA
aagtggaactgaccctgtaaagtta

SEQ ID NO: 1375 - DNA, 25 bp, synthetic construct
  source 1..25: mol_type = other DNA
aagctgaactgaccctgtaaagtta

SEQ ID NO: 1376 - DNA, 25 bp, synthetic construct
  source 1..25: mol_type = other DNA
aagcgtaactgaccctgtaaagtta

SEQ ID NO: 1377 - DNA, 25 bp, synthetic construct
  source 1..25: mol_type = other DNA
aagcggaattgaccctgtaaagtta

SEQ ID NO: 1378 - DNA, 25 bp, synthetic construct
  source 1..25: mol_type = other DNA
aagcggaactaaccctgtaaaatta

SEQ ID NO: 1379 - DNA, 25 bp, synthetic construct
  source 1..25: mol_type = other DNA
aaacggaactaaccctgtaaagtta

SEQ ID NO: 1380 - DNA, 25 bp, synthetic construct
  source 1..25: mol_type = other DNA
aaacggaactgaccctataaagtta

SEQ ID NO: 1381 - DNA, 25 bp, synthetic construct
  source 1..25: mol_type = other DNA
aaacggaactgaccctgtaaaatta

SEQ ID NO: 1382 - DNA, 25 bp, synthetic construct
  source 1..25: mol_type = other DNA
aaacagaactgaccctgtaaagtta

SEQ ID NO: 1383 - DNA, 25 bp, synthetic construct
  source 1..25: mol_type = other DNA
aaacgaaactgaccctgtaaagtta

SEQ ID NO: 1384 - DNA, 25 bp, synthetic construct
  source 1..25: mol_type = other DNA
aagcagaactaaccctgtaaagtta

SEQ ID NO: 1385 - DNA, 25 bp, synthetic construct
  source 1..25: mol_type = other DNA
aagcagaactgaccctataaagtta

SEQ ID NO: 1386 - DNA, 25 bp, synthetic construct
  source 1..25: mol_type = other DNA
aagcagaactgaccctgtaaaatta

SEQ ID NO: 1387 - DNA, 25 bp, synthetic construct
  source 1..25: mol_type = other DNA
aagcaaaactgaccctgtaaagtta

SEQ ID NO: 1388 - DNA, 25 bp, synthetic construct
  source 1..25: mol_type = other DNA
aagcgaaactaaccctgtaaagtta

SEQ ID NO: 1389 - DNA, 25 bp, synthetic construct
  source 1..25: mol_type = other DNA
aagcgaaactgaccctataaagtta

SEQ ID NO: 1390 - DNA, 25 bp, synthetic construct
  source 1..25: mol_type = other DNA
aagcgaaactgaccctgtaaaatta

SEQ ID NO: 1391 - DNA, 25 bp, synthetic construct
  source 1..25: mol_type = other DNA
aagcggaactgaccctgtaaaatta

SEQ ID NO: 1392 - DNA, 25 bp, synthetic construct
  source 1..25: mol_type = other DNA
aagcggaactgaccctataaaatta

SEQ ID NO: 1393 - DNA, 25 bp, synthetic construct
  source 1..25: mol_type = other DNA
gaagcggaactgaccctgtaaagtt

SEQ ID NO: 1394 - DNA, 25 bp, synthetic construct
  source 1..25: mol_type = other DNA
taagcggaactgaccctgtaaagtt

SEQ ID NO: 1395 - DNA, 25 bp, synthetic construct
  source 1..25: mol_type = other DNA
gaagcggaattgaccctgtaaagtt

SEQ ID NO: 1396 - DNA, 25 bp, synthetic construct
  source 1..25: mol_type = other DNA
gaagcggaacttaccctgtaaagtt

SEQ ID NO: 1397 - DNA, 25 bp, synthetic construct
  source 1..25: mol_type = other DNA
gaagcggaactgatcctgtaaagtt

SEQ ID NO: 1398 - DNA, 25 bp, synthetic construct
  source 1..25: mol_type = other DNA
gaagcggaactgactctgtaaagtt

SEQ ID NO: 1399 - DNA, 25 bp, synthetic construct
  source 1..25: mol_type = other DNA
gaagcggaactgaccttgtaaagtt

SEQ ID NO: 1400 - DNA, 25 bp, synthetic construct
  source 1..25: mol_type = other DNA
gaagcggaactgaccctttaaagtt

SEQ ID NO: 1401 - DNA, 25 bp, synthetic construct
  source 1..25: mol_type = other DNA
gaagcggaactgaccctgtaaattt

SEQ ID NO: 1402 - DNA, 25 bp, synthetic construct
  source 1..25: mol_type = other DNA
gaatcggaactgaccctgtaaagtt

SEQ ID NO: 1403 - DNA, 25 bp, synthetic construct
  source 1..25: mol_type = other DNA
gaagtggaactgaccctgtaaagtt

SEQ ID NO: 1404 - DNA, 25 bp, synthetic construct
  source 1..25: mol_type = other DNA
gaagctgaactgaccctgtaaagtt

SEQ ID NO: 1405 - DNA, 25 bp, synthetic construct
  source 1..25: mol_type = other DNA
gaagcgtaactgaccctgtaaagtt

SEQ ID NO: 1406 - DNA, 25 bp, synthetic construct
  source 1..25: mol_type = other DNA
aaagcggaactaaccctgtaaagtt

SEQ ID NO: 1407 - DNA, 25 bp, synthetic construct
  source 1..25: mol_type = other DNA
aaagcggaactgaccctataaagtt

SEQ ID NO: 1408 - DNA, 25 bp, synthetic construct
  source 1..25: mol_type = other DNA
aaagcggaactgaccctgtaaaatt

SEQ ID NO: 1409 - DNA, 25 bp, synthetic construct
  source 1..25: mol_type = other DNA
aaaacggaactgaccctgtaaagtt

SEQ ID NO: 1410 - DNA, 25 bp, synthetic construct
  source 1..25: mol_type = other DNA
aaagcagaactgaccctgtaaagtt

SEQ ID NO: 1411 - DNA, 25 bp, synthetic construct
  source 1..25: mol_type = other DNA
aaagcgaaactgaccctgtaaagtt

SEQ ID NO: 1412 - DNA, 25 bp, synthetic construct
  source 1..25: mol_type = other DNA
gaagcggaactaaccctgtaaaatt

SEQ ID NO: 1413 - DNA, 25 bp, synthetic construct
  source 1..25: mol_type = other DNA
gaaacggaactaaccctgtaaagtt

SEQ ID NO: 1414 - DNA, 25 bp, synthetic construct
  source 1..25: mol_type = other DNA
gaaacggaactgaccctataaagtt

SEQ ID NO: 1415 - DNA, 25 bp, synthetic construct
  source 1..25: mol_type = other DNA
gaaacggaactgaccctgtaaaatt

SEQ ID NO: 1416 - DNA, 25 bp, synthetic construct
  source 1..25: mol_type = other DNA
gaaacagaactgaccctgtaaagtt

SEQ ID NO: 1417 - DNA, 25 bp, synthetic construct
  source 1..25: mol_type = other DNA
gaaacgaaactgaccctgtaaagtt

SEQ ID NO: 1418 - DNA, 25 bp, synthetic construct
  source 1..25: mol_type = other DNA
gaagcagaactaaccctgtaaagtt

SEQ ID NO: 1419 - DNA, 25 bp, synthetic construct
  source 1..25: mol_type = other DNA
gaagcagaactgaccctataaagtt

SEQ ID NO: 1420 - DNA, 25 bp, synthetic construct
  source 1..25: mol_type = other DNA
gaagcagaactgaccctgtaaaatt

SEQ ID NO: 1421 - DNA, 25 bp, synthetic construct
  source 1..25: mol_type = other DNA
gaagcaaaactgaccctgtaaagtt

SEQ ID NO: 1422 - DNA, 25 bp, synthetic construct
  source 1..25: mol_type = other DNA
gaagcgaaactaaccctgtaaagtt

SEQ ID NO: 1423 - DNA, 25 bp, synthetic construct
  source 1..25: mol_type = other DNA
gaagcgaaactgaccctataaagtt

SEQ ID NO: 1424 - DNA, 25 bp, synthetic construct
  source 1..25: mol_type = other DNA
gaagcgaaactgaccctgtaaaatt

SEQ ID NO: 1425 - DNA, 25 bp, synthetic construct
  source 1..25: mol_type = other DNA
gaagcggaactgaccctgtaaaatt

SEQ ID NO: 1426 - DNA, 25 bp, synthetic construct
  source 1..25: mol_type = other DNA
gaagcggaactgaccctataaaatt

SEQ ID NO: 1427 - DNA, 25 bp, synthetic construct
  source 1..25: mol_type = other DNA
tgaagcggaattgaccctgtaaagt

SEQ ID NO: 1428 - DNA, 25 bp, synthetic construct
  source 1..25: mol_type = other DNA
tgaagcggaacttaccctgtaaagt

SEQ ID NO: 1429 - DNA, 25 bp, synthetic construct
  source 1..25: mol_type = other DNA
tgaagcggaactgatcctgtaaagt

SEQ ID NO: 1430 - DNA, 25 bp, synthetic construct
  source 1..25: mol_type = other DNA
tgaagcggaactgactctgtaaagt

SEQ ID NO: 1431 - DNA, 25 bp, synthetic construct
  source 1..25: mol_type = other DNA
tgaagcggaactgaccttgtaaagt

SEQ ID NO: 1432 - DNA, 25 bp, synthetic construct
  source 1..25: mol_type = other DNA
tgaagcggaactgaccctttaaagt

SEQ ID NO: 1433 - DNA, 25 bp, synthetic construct
  source 1..25: mol_type = other DNA
ttaagcggaactgaccctgtaaagt

SEQ ID NO: 1434 - DNA, 25 bp, synthetic construct
  source 1..25: mol_type = other DNA
tgaagcggaactgaccctgtaaatt

SEQ ID NO: 1435 - DNA, 25 bp, synthetic construct
  source 1..25: mol_type = other DNA
tgaatcggaactgaccctgtaaagt

SEQ ID NO: 1436 - DNA, 25 bp, synthetic construct
  source 1..25: mol_type = other DNA
tgaagtggaactgaccctgtaaagt

SEQ ID NO: 1437 - DNA, 25 bp, synthetic construct
  source 1..25: mol_type = other DNA
tgaagctgaactgaccctgtaaagt

SEQ ID NO: 1438 - DNA, 25 bp, synthetic construct
  source 1..25: mol_type = other DNA
tgaagcgtaactgaccctgtaaagt

SEQ ID NO: 1439 - DNA, 25 bp, synthetic construct
  source 1..25: mol_type = other DNA
tgaagcggaactaaccctgtaaaat

SEQ ID NO: 1440 - DNA, 25 bp, synthetic construct
  source 1..25: mol_type = other DNA
taaagcggaactaaccctgtaaagt

SEQ ID NO: 1441 - DNA, 25 bp, synthetic construct
  source 1..25: mol_type = other DNA
taaagcggaactgaccctataaagt

SEQ ID NO: 1442 - DNA, 25 bp, synthetic construct
  source 1..25: mol_type = other DNA
taaagcggaactgaccctgtaaaat

SEQ ID NO: 1443 - DNA, 25 bp, synthetic construct
  source 1..25: mol_type = other DNA
taaaacggaactgaccctgtaaagt

SEQ ID NO: 1444 - DNA, 25 bp, synthetic construct
  source 1..25: mol_type = other DNA
taaagcagaactgaccctgtaaagt

SEQ ID NO: 1445 - DNA, 25 bp, synthetic construct
  source 1..25: mol_type = other DNA
taaagcgaaactgaccctgtaaagt

SEQ ID NO: 1446 - DNA, 25 bp, synthetic construct
  source 1..25: mol_type = other DNA
tgaaacggaactaaccctgtaaagt

SEQ ID NO: 1447 - DNA, 25 bp, synthetic construct
  source 1..25: mol_type = other DNA
tgaaacggaactgaccctataaagt

SEQ ID NO: 1448 - DNA, 25 bp, synthetic construct
  source 1..25: mol_type = other DNA
tgaaacggaactgaccctgtaaaat

SEQ ID NO: 1449 - DNA, 25 bp, synthetic construct
  source 1..25: mol_type = other DNA
tgaaacagaactgaccctgtaaagt

SEQ ID NO: 1450 - DNA, 25 bp, synthetic construct
  source 1..25: mol_type = other DNA
tgaaacgaaactgaccctgtaaagt

SEQ ID NO: 1451 - DNA, 25 bp, synthetic construct
  source 1..25: mol_type = other DNA
tgaagcagaactaaccctgtaaagt

SEQ ID NO: 1452 - DNA, 25 bp, synthetic construct
  source 1..25: mol_type = other DNA
tgaagcagaactgaccctataaagt

SEQ ID NO: 1453 - DNA, 25 bp, synthetic construct
  source 1..25: mol_type = other DNA
tgaagcagaactgaccctgtaaaat

SEQ ID NO: 1454 - DNA, 25 bp, synthetic construct
  source 1..25: mol_type = other DNA
tgaagcaaaactgaccctgtaaagt

SEQ ID NO: 1455 - DNA, 25 bp, synthetic construct
  source 1..25: mol_type = other DNA
tgaagcgaaactaaccctgtaaagt

SEQ ID NO: 1456 - DNA, 25 bp, synthetic construct
  source 1..25: mol_type = other DNA
tgaagcgaaactgaccctataaagt

SEQ ID NO: 1457 - DNA, 25 bp, synthetic construct
  source 1..25: mol_type = other DNA
tgaagcgaaactgaccctgtaaaat

SEQ ID NO: 1458 - DNA, 25 bp, synthetic construct
  source 1..25: mol_type = other DNA
tgaagcggaactgaccctgtaaaat

SEQ ID NO: 1459 - DNA, 25 bp, synthetic construct
  source 1..25: mol_type = other DNA
tgaagcggaactgaccctataaaat

SEQ ID NO: 1460 - DNA, 25 bp, synthetic construct
  source 1..25: mol_type = other DNA
ttgaagcggaactgaccctgtaaag

SEQ ID NO: 1461 - DNA, 25 bp, synthetic construct
  source 1..25: mol_type = other DNA
gtgaagcggaattgaccctgtaaag

SEQ ID NO: 1462 - DNA, 25 bp, synthetic construct
  source 1..25: mol_type = other DNA
gtgaagcggaacttaccctgtaaag

SEQ ID NO: 1463 - DNA, 25 bp, synthetic construct
  source 1..25: mol_type = other DNA
gtgaagcggaactgatcctgtaaag

SEQ ID NO: 1464 - DNA, 25 bp, synthetic construct
  source 1..25: mol_type = other DNA
gtgaagcggaactgactctgtaaag

SEQ ID NO: 1465 - DNA, 25 bp, synthetic construct
  source 1..25: mol_type = other DNA
gtgaagcggaactgaccttgtaaag

SEQ ID NO: 1466 - DNA, 25 bp, synthetic construct
  source 1..25: mol_type = other DNA
gtgaagcggaactgaccctttaaag

SEQ ID NO: 1467 - DNA, 25 bp, synthetic construct
  source 1..25: mol_type = other DNA
gttaagcggaactgaccctgtaaag

SEQ ID NO: 1468 - DNA, 25 bp, synthetic construct
  source 1..25: mol_type = other DNA
gtgaatcggaactgaccctgtaaag

SEQ ID NO: 1469 - DNA, 25 bp, synthetic construct
  source 1..25: mol_type = other DNA
gtgaagtggaactgaccctgtaaag

SEQ ID NO: 1470 - DNA, 25 bp, synthetic construct
  source 1..25: mol_type = other DNA
gtgaagctgaactgaccctgtaaag

SEQ ID NO: 1471 - DNA, 25 bp, synthetic construct
  source 1..25: mol_type = other DNA
gtgaagcgtaactgaccctgtaaag

SEQ ID NO: 1472 - DNA, 25 bp, synthetic construct
  source 1..25: mol_type = other DNA
atgaagcggaactaaccctgtaaag

SEQ ID NO: 1473 - DNA, 25 bp, synthetic construct
  source 1..25: mol_type = other DNA
atgaagcggaactgaccctataaag

SEQ ID NO: 1474 - DNA, 25 bp, synthetic construct
  source 1..25: mol_type = other DNA
atgaagcggaactgaccctgtaaaa

SEQ ID NO: 1475 - DNA, 25 bp, synthetic construct
  source 1..25: mol_type = other DNA
ataaagcggaactgaccctgtaaag

SEQ ID NO: 1476 - DNA, 25 bp, synthetic construct
  source 1..25: mol_type = other DNA
atgaaacggaactgaccctgtaaag

SEQ ID NO: 1477 - DNA, 25 bp, synthetic construct
  source 1..25: mol_type = other DNA
atgaagcagaactgaccctgtaaag

SEQ ID NO: 1478 - DNA, 25 bp, synthetic construct
  source 1..25: mol_type = other DNA
atgaagcgaaactgaccctgtaaag

SEQ ID NO: 1479 - DNA, 25 bp, synthetic construct
  source 1..25: mol_type = other DNA
gtgaagcggaactaaccctgtaaaa

SEQ ID NO: 1480 - DNA, 25 bp, synthetic construct
  source 1..25: mol_type = other DNA
gtaaagcggaactaaccctgtaaag

SEQ ID NO: 1481 - DNA, 25 bp, synthetic construct
  source 1..25: mol_type = other DNA
gtaaagcggaactgaccctataaag

SEQ ID NO: 1482 - DNA, 25 bp, synthetic construct
  source 1..25: mol_type = other DNA
gtaaagcggaactgaccctgtaaaa

SEQ ID NO: 1483 - DNA, 25 bp, synthetic construct
  source 1..25: mol_type = other DNA
gtaaaacggaactgaccctgtaaag

SEQ ID NO: 1484 - DNA, 25 bp, synthetic construct
  source 1..25: mol_type = other DNA
gtaaagcagaactgaccctgtaaag

SEQ ID NO: 1485 - DNA, 25 bp, synthetic construct
  source 1..25: mol_type = other DNA
gtaaagcgaaactgaccctgtaaag

SEQ ID NO: 1486 - DNA, 25 bp, synthetic construct
  source 1..25: mol_type = other DNA
gtgaaacggaactaaccctgtaaag

SEQ ID NO: 1487 - DNA, 25 bp, synthetic construct
  source 1..25: mol_type = other DNA
gtgaaacggaactgaccctataaag

SEQ ID NO: 1488 - DNA, 25 bp, synthetic construct
  source 1..25: mol_type = other DNA
gtgaaacggaactgaccctgtaaaa

SEQ ID NO: 1489 - DNA, 25 bp, synthetic construct
  source 1..25: mol_type = other DNA
gtgaaacagaactgaccctgtaaag

SEQ ID NO: 1490 - DNA, 25 bp, synthetic construct
  source 1..25: mol_type = other DNA
gtgaaacgaaactgaccctgtaaag

SEQ ID NO: 1491 - DNA, 25 bp, synthetic construct
  source 1..25: mol_type = other DNA
gtgaagcagaactaaccctgtaaag

SEQ ID NO: 1492 - DNA, 25 bp, synthetic construct
  source 1..25: mol_type = other DNA
gtgaagcagaactgaccctataaag

SEQ ID NO: 1493 - DNA, 25 bp, synthetic construct
  source 1..25: mol_type = other DNA
gtgaagcagaactgaccctgtaaaa

SEQ ID NO: 1494 - DNA, 25 bp, synthetic construct
  source 1..25: mol_type = other DNA
gtgaagcaaaactgaccctgtaaag

SEQ ID NO: 1495 - DNA, 25 bp, synthetic construct
  source 1..25: mol_type = other DNA
gtgaagcgaaactaaccctgtaaag

SEQ ID NO: 1496 - DNA, 25 bp, synthetic construct
  source 1..25: mol_type = other DNA
gtgaagcgaaactgaccctataaag

SEQ ID NO: 1497 - DNA, 25 bp, synthetic construct
  source 1..25: mol_type = other DNA
gtgaagcgaaactgaccctgtaaaa

SEQ ID NO: 1498 - DNA, 25 bp, synthetic construct
  source 1..25: mol_type = other DNA
gtgaagcggaactgaccctgtaaaa

SEQ ID NO: 1499 - DNA, 25 bp, synthetic construct
  source 1..25: mol_type = other DNA
gtgaagcggaactgaccctataaaa

SEQ ID NO: 1500 - DNA, 25 bp, synthetic construct
  source 1..25: mol_type = other DNA
ggtgaagcggaactgaccctgtaaa

SEQ ID NO: 1501 - DNA, 25 bp, synthetic construct
  source 1..25: mol_type = other DNA
tgtgaagcggaactgaccctgtaaa

SEQ ID NO: 1502 - DNA, 25 bp, synthetic construct
  source 1..25: mol_type = other DNA
ggtgaagcgtaactgaccctgtaaa

SEQ ID NO: 1503 - DNA, 25 bp, synthetic construct
  source 1..25: mol_type = other DNA
ggtgaagcggaattgaccctgtaaa

SEQ ID NO: 1504 - DNA, 25 bp, synthetic construct
  source 1..25: mol_type = other DNA
ggtgaagcggaacttaccctgtaaa

SEQ ID NO: 1505 - DNA, 25 bp, synthetic construct
  source 1..25: mol_type = other DNA
ggtgaagcggaactgatcctgtaaa

SEQ ID NO: 1506 - DNA, 25 bp, synthetic construct
  source 1..25: mol_type = other DNA
ggtgaagcggaactgactctgtaaa

SEQ ID NO: 1507 - DNA, 25 bp, synthetic construct
  source 1..25: mol_type = other DNA
ggtgaagcggaactgaccttgtaaa

SEQ ID NO: 1508 - DNA, 25 bp, synthetic construct
  source 1..25: mol_type = other DNA
gttgaagcggaactgaccctgtaaa

SEQ ID NO: 1509 - DNA, 25 bp, synthetic construct
  source 1..25: mol_type = other DNA
ggtgaagcggaactgaccctttaaa

SEQ ID NO: 1510 - DNA, 25 bp, synthetic construct
  source 1..25: mol_type = other DNA
ggttaagcggaactgaccctgtaaa

SEQ ID NO: 1511 - DNA, 25 bp, synthetic construct
  source 1..25: mol_type = other DNA
ggtgaatcggaactgaccctgtaaa

SEQ ID NO: 1512 - DNA, 25 bp, synthetic construct
  source 1..25: mol_type = other DNA
ggtgaagtggaactgaccctgtaaa

SEQ ID NO: 1513 - DNA, 25 bp, synthetic construct
  source 1..25: mol_type = other DNA
ggtgaagctgaactgaccctgtaaa

SEQ ID NO: 1514 - DNA, 25 bp, synthetic construct
  source 1..25: mol_type = other DNA
agtgaagcgaaactgaccctgtaaa

SEQ ID NO: 1515 - DNA, 25 bp, synthetic construct
  source 1..25: mol_type = other DNA
agtgaagcggaactaaccctgtaaa

SEQ ID NO: 1516 - DNA, 25 bp, synthetic construct
  source 1..25: mol_type = other DNA
aatgaagcggaactgaccctgtaaa

SEQ ID NO: 1517 - DNA, 25 bp, synthetic construct
  source 1..25: mol_type = other DNA
agtgaagcggaactgaccctataaa

SEQ ID NO: 1518 - DNA, 25 bp, synthetic construct
  source 1..25: mol_type = other DNA
agtaaagcggaactgaccctgtaaa

SEQ ID NO: 1519 - DNA, 25 bp, synthetic construct
  source 1..25: mol_type = other DNA
agtgaaacggaactgaccctgtaaa

SEQ ID NO: 1520 - DNA, 25 bp, synthetic construct
  source 1..25: mol_type = other DNA
agtgaagcagaactgaccctgtaaa

SEQ ID NO: 1521 - DNA, 25 bp, synthetic construct
  source 1..25: mol_type = other DNA
ggtgaagcgaaactaaccctgtaaa

SEQ ID NO: 1522 - DNA, 25 bp, synthetic construct
  source 1..25: mol_type = other DNA
ggtgaagcgaaactgaccctataaa

SEQ ID NO: 1523 - DNA, 25 bp, synthetic construct
  source 1..25: mol_type = other DNA
gatgaagcgaaactgaccctgtaaa

SEQ ID NO: 1524 - DNA, 25 bp, synthetic construct
  source 1..25: mol_type = other DNA
gatgaagcggaactaaccctgtaaa

SEQ ID NO: 1525 - DNA, 25 bp, synthetic construct
  source 1..25: mol_type = other DNA
gatgaagcggaactgaccctataaa

SEQ ID NO: 1526 - DNA, 25 bp, synthetic construct
  source 1..25: mol_type = other DNA
gataaagcggaactgaccctgtaaa

SEQ ID NO: 1527 - DNA, 25 bp, synthetic construct
  source 1..25: mol_type = other DNA
gatgaaacggaactgaccctgtaaa

SEQ ID NO: 1528 - DNA, 25 bp, synthetic construct
  source 1..25: mol_type = other DNA
gatgaagcagaactgaccctgtaaa

SEQ ID NO: 1529 - DNA, 25 bp, synthetic construct
  source 1..25: mol_type = other DNA
ggtaaagcgaaactgaccctgtaaa

SEQ ID NO: 1530 - DNA, 25 bp, synthetic construct
  source 1..25: mol_type = other DNA
ggtaaagcggaactaaccctgtaaa

SEQ ID NO: 1531 - DNA, 25 bp, synthetic construct
  source 1..25: mol_type = other DNA
ggtaaagcggaactgaccctataaa

SEQ ID NO: 1532 - DNA, 25 bp, synthetic construct
  source 1..25: mol_type = other DNA
ggtaaaacggaactgaccctgtaaa

SEQ ID NO: 1533 - DNA, 25 bp, synthetic construct
  source 1..25: mol_type = other DNA
ggtaaagcagaactgaccctgtaaa

SEQ ID NO: 1534 - DNA, 25 bp, synthetic construct
  source 1..25: mol_type = other DNA
ggtgaaacgaaactgaccctgtaaa

SEQ ID NO: 1535 - DNA, 25 bp, synthetic construct
  source 1..25: mol_type = other DNA
ggtgaaacggaactaaccctgtaaa

SEQ ID NO: 1536 - DNA, 25 bp, synthetic construct
  source 1..25: mol_type = other DNA
ggtgaaacggaactgaccctataaa

SEQ ID NO: 1537 - DNA, 25 bp, synthetic construct
  source 1..25: mol_type = other DNA
ggtgaaacagaactgaccctgtaaa

SEQ ID NO: 1538 - DNA, 25 bp, synthetic construct
  source 1..25: mol_type = other DNA
ggtgaagcaaaactgaccctgtaaa

SEQ ID NO: 1539 - DNA, 25 bp, synthetic construct
  source 1..25: mol_type = other DNA
ggtgaagcagaactaaccctgtaaa

SEQ ID NO: 1540 - DNA, 25 bp, synthetic construct
  source 1..25: mol_type = other DNA
ggtgaagcagaactgaccctataaa

SEQ ID NO: 1541 - DNA, 25 bp, synthetic construct
  source 1..25: mol_type = other DNA
ggtgaagcggaactgaccctataaa

SEQ ID NO: 1542 - DNA, 25 bp, synthetic construct
  source 1..25: mol_type = other DNA
aggtgaagcggaactgaccctgtaa

SEQ ID NO: 1543 - DNA, 25 bp, synthetic construct
  source 1..25: mol_type = other DNA
aggtgaagctgaactgaccctgtaa

SEQ ID NO: 1544 - DNA, 25 bp, synthetic construct
  source 1..25: mol_type = other DNA
aggtgaagcgtaactgaccctgtaa

SEQ ID NO: 1545 - DNA, 25 bp, synthetic construct
  source 1..25: mol_type = other DNA
aggtgaagcggaattgaccctgtaa

SEQ ID NO: 1546 - DNA, 25 bp, synthetic construct
  source 1..25: mol_type = other DNA
aggtgaagcggaacttaccctgtaa

SEQ ID NO: 1547 - DNA, 25 bp, synthetic construct
  source 1..25: mol_type = other DNA
aggtgaagcggaactgatcctgtaa

SEQ ID NO: 1548 - DNA, 25 bp, synthetic construct
  source 1..25: mol_type = other DNA
aggtgaagcggaactgactctgtaa

SEQ ID NO: 1549 - DNA, 25 bp, synthetic construct
  source 1..25: mol_type = other DNA
atgtgaagcggaactgaccctgtaa

SEQ ID NO: 1550 - DNA, 25 bp, synthetic construct
  source 1..25: mol_type = other DNA
aggtgaagcggaactgaccttgtaa

SEQ ID NO: 1551 - DNA, 25 bp, synthetic construct
  source 1..25: mol_type = other DNA
aggtgaagcggaactgaccctttaa

SEQ ID NO: 1552 - DNA, 25 bp, synthetic construct
  source 1..25: mol_type = other DNA
agttgaagcggaactgaccctgtaa

SEQ ID NO: 1553 - DNA, 25 bp, synthetic construct
  source 1..25: mol_type = other DNA
aggttaagcggaactgaccctgtaa

SEQ ID NO: 1554 - DNA, 25 bp, synthetic construct
  source 1..25: mol_type = other DNA
aggtgaatcggaactgaccctgtaa

SEQ ID NO: 1555 - DNA, 25 bp, synthetic construct
  source 1..25: mol_type = other DNA
aggtgaagtggaactgaccctgtaa

SEQ ID NO: 1556 - DNA, 25 bp, synthetic construct
  source 1..25: mol_type = other DNA
aggtgaagcaaaactgaccctgtaa

SEQ ID NO: 1557 - DNA, 25 bp, synthetic construct
  source 1..25: mol_type = other DNA
aggtgaagcagaactaaccctgtaa

SEQ ID NO: 1558 - DNA, 25 bp, synthetic construct
  source 1..25: mol_type = other DNA
aggtgaagcagaactgaccctataa

SEQ ID NO: 1559 - DNA, 25 bp, synthetic construct
  source 1..25: mol_type = other DNA
aggtgaagcgaaactaaccctgtaa

SEQ ID NO: 1560 - DNA, 25 bp, synthetic construct
  source 1..25: mol_type = other DNA
aggtgaagcgaaactgaccctataa

SEQ ID NO: 1561 - DNA, 25 bp, synthetic construct
  source 1..25: mol_type = other DNA
aagtgaagcagaactgaccctgtaa

SEQ ID NO: 1562 - DNA, 25 bp, synthetic construct
  source 1..25: mol_type = other DNA
aagtgaagcgaaactgaccctgtaa

SEQ ID NO: 1563 - DNA, 25 bp, synthetic construct
  source 1..25: mol_type = other DNA
aagtgaagcggaactaaccctgtaa

SEQ ID NO: 1564 - DNA, 25 bp, synthetic construct
  source 1..25: mol_type = other DNA
aagtgaagcggaactgaccctataa

SEQ ID NO: 1565 - DNA, 25 bp, synthetic construct
  source 1..25: mol_type = other DNA
aaatgaagcggaactgaccctgtaa

SEQ ID NO: 1566 - DNA, 25 bp, synthetic construct
  source 1..25: mol_type = other DNA
aagtaaagcggaactgaccctgtaa

SEQ ID NO: 1567 - DNA, 25 bp, synthetic construct
  source 1..25: mol_type = other DNA
aagtgaaacggaactgaccctgtaa

SEQ ID NO: 1568 - DNA, 25 bp, synthetic construct
  source 1..25: mol_type = other DNA
agatgaagcagaactgaccctgtaa

SEQ ID NO: 1569 - DNA, 25 bp, synthetic construct
  source 1..25: mol_type = other DNA
agatgaagcgaaactgaccctgtaa

SEQ ID NO: 1570 - DNA, 25 bp, synthetic construct
  source 1..25: mol_type = other DNA
agatgaagcggaactaaccctgtaa

SEQ ID NO: 1571 - DNA, 25 bp, synthetic construct
  source 1..25: mol_type = other DNA
agatgaagcggaactgaccctataa

SEQ ID NO: 1572 - DNA, 25 bp, synthetic construct
  source 1..25: mol_type = other DNA
agataaagcggaactgaccctgtaa

SEQ ID NO: 1573 - DNA, 25 bp, synthetic construct
  source 1..25: mol_type = other DNA
agatgaaacggaactgaccctgtaa

SEQ ID NO: 1574 - DNA, 25 bp, synthetic construct
  source 1..25: mol_type = other DNA
aggtaaagcagaactgaccctgtaa

SEQ ID NO: 1575 - DNA, 25 bp, synthetic construct
  source 1..25: mol_type = other DNA
aggtaaagcgaaactgaccctgtaa

SEQ ID NO: 1576 - DNA, 25 bp, synthetic construct
  source 1..25: mol_type = other DNA
aggtaaagcggaactaaccctgtaa

SEQ ID NO: 1577 - DNA, 25 bp, synthetic construct
  source 1..25: mol_type = other DNA
aggtaaagcggaactgaccctataa

SEQ ID NO: 1578 - DNA, 25 bp, synthetic construct
  source 1..25: mol_type = other DNA
aggtaaaacggaactgaccctgtaa

SEQ ID NO: 1579 - DNA, 25 bp, synthetic construct
  source 1..25: mol_type = other DNA
aggtgaaacagaactgaccctgtaa

SEQ ID NO: 1580 - DNA, 25 bp, synthetic construct
  source 1..25: mol_type = other DNA
aggtgaaacgaaactgaccctgtaa

SEQ ID NO: 1581 - DNA, 25 bp, synthetic construct
  source 1..25: mol_type = other DNA
aggtgaaacggaactaaccctgtaa

SEQ ID NO: 1582 - DNA, 25 bp, synthetic construct
  source 1..25: mol_type = other DNA
aggtgaaacggaactgaccctataa

SEQ ID NO: 1583 - DNA, 25 bp, synthetic construct
  source 1..25: mol_type = other DNA
aggtgaagcggaactgaccctataa

SEQ ID NO: 1584 - DNA, 25 bp, synthetic construct
  source 1..25: mol_type = other DNA
taggtgaagcggaactgaccctgta

SEQ ID NO: 1585 - DNA, 25 bp, synthetic construct
  source 1..25: mol_type = other DNA
gaggtgaagtggaactgaccctgta

SEQ ID NO: 1586 - DNA, 25 bp, synthetic construct
  source 1..25: mol_type = other DNA
gaggtgaagctgaactgaccctgta

SEQ ID NO: 1587 - DNA, 25 bp, synthetic construct
  source 1..25: mol_type = other DNA
gaggtgaagcgtaactgaccctgta

SEQ ID NO: 1588 - DNA, 25 bp, synthetic construct
  source 1..25: mol_type = other DNA
gaggtgaagcggaattgaccctgta

SEQ ID NO: 1589 - DNA, 25 bp, synthetic construct
  source 1..25: mol_type = other DNA
gaggtgaagcggaacttaccctgta

SEQ ID NO: 1590 - DNA, 25 bp, synthetic construct
  source 1..25: mol_type = other DNA
gaggtgaagcggaactgatcctgta

SEQ ID NO: 1591 - DNA, 25 bp, synthetic construct
  source 1..25: mol_type = other DNA
gaggtgaagcggaactgactctgta

SEQ ID NO: 1592 - DNA, 25 bp, synthetic construct
  source 1..25: mol_type = other DNA
gaggtgaagcggaactgaccttgta

SEQ ID NO: 1593 - DNA, 25 bp, synthetic construct
  source 1..25: mol_type = other DNA
gaggtgaagcggaactgacccttta

SEQ ID NO: 1594 - DNA, 25 bp, synthetic construct
  source 1..25: mol_type = other DNA
gatgtgaagcggaactgaccctgta

SEQ ID NO: 1595 - DNA, 25 bp, synthetic construct
  source 1..25: mol_type = other DNA
gagttgaagcggaactgaccctgta

SEQ ID NO: 1596 - DNA, 25 bp, synthetic construct
  source 1..25: mol_type = other DNA
gaggttaagcggaactgaccctgta

SEQ ID NO: 1597 - DNA, 25 bp, synthetic construct
  source 1..25: mol_type = other DNA
gaggtgaatcggaactgaccctgta

SEQ ID NO: 1598 - DNA, 25 bp, synthetic construct
  source 1..25: mol_type = other DNA
aaggtgaagcagaactgaccctgta

SEQ ID NO: 1599 - DNA, 25 bp, synthetic construct
  source 1..25: mol_type = other DNA
aaggtgaagcgaaactgaccctgta

SEQ ID NO: 1600 - DNA, 25 bp, synthetic construct
  source 1..25: mol_type = other DNA
aaggtgaagcggaactaaccctgta

SEQ ID NO: 1601 - DNA, 25 bp, synthetic construct
  source 1..25: mol_type = other DNA
aaggtgaagcggaactgaccctata

SEQ ID NO: 1602 - DNA, 25 bp, synthetic construct
  source 1..25: mol_type = other DNA
aaagtgaagcggaactgaccctgta

SEQ ID NO: 1603 - DNA, 25 bp, synthetic construct
  source 1..25: mol_type = other DNA
aagatgaagcggaactgaccctgta

SEQ ID NO: 1604 - DNA, 25 bp, synthetic construct
  source 1..25: mol_type = other DNA
aaggtaaagcggaactgaccctgta

SEQ ID NO: 1605 - DNA, 25 bp, synthetic construct
  source 1..25: mol_type = other DNA
aaggtgaaacggaactgaccctgta

SEQ ID NO: 1606 - DNA, 25 bp, synthetic construct
  source 1..25: mol_type = other DNA
gaggtgaagcaaaactgaccctgta

SEQ ID NO: 1607 - DNA, 25 bp, synthetic construct
  source 1..25: mol_type = other DNA
gaggtgaagcagaactaaccctgta

SEQ ID NO: 1608 - DNA, 25 bp, synthetic construct
  source 1..25: mol_type = other DNA
gaggtgaagcagaactgaccctata

SEQ ID NO: 1609 - DNA, 25 bp, synthetic construct
  source 1..25: mol_type = other DNA
gaggtgaagcgaaactaaccctgta

SEQ ID NO: 1610 - DNA, 25 bp, synthetic construct
  source 1..25: mol_type = other DNA
gaggtgaagcgaaactgaccctata

SEQ ID NO: 1611 - DNA, 25 bp, synthetic construct
  source 1..25: mol_type = other DNA
gaagtgaagcagaactgaccctgta

SEQ ID NO: 1612 - DNA, 25 bp, synthetic construct
  source 1..25: mol_type = other DNA
gaagtgaagcgaaactgaccctgta

SEQ ID NO: 1613 - DNA, 25 bp, synthetic construct
  source 1..25: mol_type = other DNA
gaagtgaagcggaactaaccctgta

SEQ ID NO: 1614 - DNA, 25 bp, synthetic construct
  source 1..25: mol_type = other DNA
gaagtgaagcggaactgaccctata

SEQ ID NO: 1615 - DNA, 25 bp, synthetic construct
  source 1..25: mol_type = other DNA
gaaatgaagcggaactgaccctgta

SEQ ID NO: 1616 - DNA, 25 bp, synthetic construct
  source 1..25: mol_type = other DNA
gaagtaaagcggaactgaccctgta

SEQ ID NO: 1617 - DNA, 25 bp, synthetic construct
  source 1..25: mol_type = other DNA
gaagtgaaacggaactgaccctgta

SEQ ID NO: 1618 - DNA, 25 bp, synthetic construct
  source 1..25: mol_type = other DNA
gagatgaagcagaactgaccctgta

SEQ ID NO: 1619 - DNA, 25 bp, synthetic construct
  source 1..25: mol_type = other DNA
gagatgaagcgaaactgaccctgta

SEQ ID NO: 1620 - DNA, 25 bp, synthetic construct
  source 1..25: mol_type = other DNA
gagatgaagcggaactaaccctgta

SEQ ID NO: 1621 - DNA, 25 bp, synthetic construct
  source 1..25: mol_type = other DNA
gagatgaagcggaactgaccctata

SEQ ID NO: 1622 - DNA, 25 bp, synthetic construct
  source 1..25: mol_type = other DNA
gagataaagcggaactgaccctgta

SEQ ID NO: 1623 - DNA, 25 bp, synthetic construct
  source 1..25: mol_type = other DNA
gagatgaaacggaactgaccctgta

SEQ ID NO: 1624 - DNA, 25 bp, synthetic construct
  source 1..25: mol_type = other DNA
gaggtaaagcagaactgaccctgta

SEQ ID NO: 1625 - DNA, 25 bp, synthetic construct
  source 1..25: mol_type = other DNA
gaggtaaagcgaaactgaccctgta

SEQ ID NO: 1626 - DNA, 25 bp, synthetic construct
  source 1..25: mol_type = other DNA
gaggtaaagcggaactaaccctgta

SEQ ID NO: 1627 - DNA, 25 bp, synthetic construct
  source 1..25: mol_type = other DNA
gaggtaaagcggaactgaccctata

SEQ ID NO: 1628 - DNA, 25 bp, synthetic construct
  source 1..25: mol_type = other DNA
gaggtaaaacggaactgaccctgta

SEQ ID NO: 1629 - DNA, 25 bp, synthetic construct
  source 1..25: mol_type = other DNA
gaggtgaaacagaactgaccctgta

SEQ ID NO: 1630 - DNA, 25 bp, synthetic construct
  source 1..25: mol_type = other DNA
gaggtgaaacgaaactgaccctgta

SEQ ID NO: 1631 - DNA, 25 bp, synthetic construct
  source 1..25: mol_type = other DNA
gaggtgaaacggaactaaccctgta

SEQ ID NO: 1632 - DNA, 25 bp, synthetic construct
  source 1..25: mol_type = other DNA
gaggtgaaacggaactgaccctata

SEQ ID NO: 1633 - DNA, 25 bp, synthetic construct
  source 1..25: mol_type = other DNA
gaggtgaagcggaactgaccctata

SEQ ID NO: 1634 - DNA, 25 bp, synthetic construct
  source 1..25: mol_type = other DNA
tgaggtgaagcggaactgaccctgt

SEQ ID NO: 1635 - DNA, 25 bp, synthetic construct
  source 1..25: mol_type = other DNA
ggaggtgaatcggaactgaccctgt

SEQ ID NO: 1636 - DNA, 25 bp, synthetic construct
  source 1..25: mol_type = other DNA
ggaggtgaagtggaactgaccctgt

SEQ ID NO: 1637 - DNA, 25 bp, synthetic construct
  source 1..25: mol_type = other DNA
ggaggtgaagctgaactgaccctgt

SEQ ID NO: 1638 - DNA, 25 bp, synthetic construct
  source 1..25: mol_type = other DNA
ggaggtgaagcgtaactgaccctgt

SEQ ID NO: 1639 - DNA, 25 bp, synthetic construct
  source 1..25: mol_type = other DNA
ggaggtgaagcggaattgaccctgt

SEQ ID NO: 1640 - DNA, 25 bp, synthetic construct
  source 1..25: mol_type = other DNA
ggaggtgaagcggaacttaccctgt

SEQ ID NO: 1641 - DNA, 25 bp, synthetic construct
  source 1..25: mol_type = other DNA
gtaggtgaagcggaactgaccctgt

SEQ ID NO: 1642 - DNA, 25 bp, synthetic construct
  source 1..25: mol_type = other DNA
ggaggtgaagcggaactgatcctgt

SEQ ID NO: 1643 - DNA, 25 bp, synthetic construct
  source 1..25: mol_type = other DNA
ggaggtgaagcggaactgactctgt

SEQ ID NO: 1644 - DNA, 25 bp, synthetic construct
  source 1..25: mol_type = other DNA
ggaggtgaagcggaactgaccttgt

SEQ ID NO: 1645 - DNA, 25 bp, synthetic construct
  source 1..25: mol_type = other DNA
ggaggtgaagcggaactgacccttt

SEQ ID NO: 1646 - DNA, 25 bp, synthetic construct
  source 1..25: mol_type = other DNA
ggatgtgaagcggaactgaccctgt

SEQ ID NO: 1647 - DNA, 25 bp, synthetic construct
  source 1..25: mol_type = other DNA
ggagttgaagcggaactgaccctgt

SEQ ID NO: 1648 - DNA, 25 bp, synthetic construct
  source 1..25: mol_type = other DNA
ggaggttaagcggaactgaccctgt

SEQ ID NO: 1649 - DNA, 25 bp, synthetic construct
  source 1..25: mol_type = other DNA
agaggtgaaacggaactgaccctgt

SEQ ID NO: 1650 - DNA, 25 bp, synthetic construct
  source 1..25: mol_type = other DNA
agaggtgaagcagaactgaccctgt

SEQ ID NO: 1651 - DNA, 25 bp, synthetic construct
  source 1..25: mol_type = other DNA
agaggtgaagcgaaactgaccctgt

SEQ ID NO: 1652 - DNA, 25 bp, synthetic construct
  source 1..25: mol_type = other DNA
agaggtgaagcggaactaaccctgt

SEQ ID NO: 1653 - DNA, 25 bp, synthetic construct
  source 1..25: mol_type = other DNA
aaaggtgaagcggaactgaccctgt

SEQ ID NO: 1654 - DNA, 25 bp, synthetic construct
  source 1..25: mol_type = other DNA
agaggtgaagcggaactgaccctat

SEQ ID NO: 1655 - DNA, 25 bp, synthetic construct
  source 1..25: mol_type = other DNA
agaagtgaagcggaactgaccctgt

SEQ ID NO: 1656 - DNA, 25 bp, synthetic construct
  source 1..25: mol_type = other DNA
agagatgaagcggaactgaccctgt

SEQ ID NO: 1657 - DNA, 25 bp, synthetic construct
  source 1..25: mol_type = other DNA
agaggtaaagcggaactgaccctgt

SEQ ID NO: 1658 - DNA, 25 bp, synthetic construct
  source 1..25: mol_type = other DNA
ggaggtgaaacagaactgaccctgt

SEQ ID NO: 1659 - DNA, 25 bp, synthetic construct
  source 1..25: mol_type = other DNA
ggaggtgaaacgaaactgaccctgt

SEQ ID NO: 1660 - DNA, 25 bp, synthetic construct
  source 1..25: mol_type = other DNA
ggaggtgaaacggaactaaccctgt

SEQ ID NO: 1661 - DNA, 25 bp, synthetic construct
  source 1..25: mol_type = other DNA
ggaggtgaaacggaactgaccctat

SEQ ID NO: 1662 - DNA, 25 bp, synthetic construct
  source 1..25: mol_type = other DNA
ggaggtgaagcaaaactgaccctgt

SEQ ID NO: 1663 - DNA, 25 bp, synthetic construct
  source 1..25: mol_type = other DNA
ggaggtgaagcagaactaaccctgt

SEQ ID NO: 1664 - DNA, 25 bp, synthetic construct
  source 1..25: mol_type = other DNA
ggaggtgaagcagaactgaccctat

SEQ ID NO: 1665 - DNA, 25 bp, synthetic construct
  source 1..25: mol_type = other DNA
ggaggtgaagcgaaactaaccctgt

SEQ ID NO: 1666 - DNA, 25 bp, synthetic construct
  source 1..25: mol_type = other DNA
ggaggtgaagcgaaactgaccctat

SEQ ID NO: 1667 - DNA, 25 bp, synthetic construct
  source 1..25: mol_type = other DNA
gaaggtgaaacggaactgaccctgt

SEQ ID NO: 1668 - DNA, 25 bp, synthetic construct
  source 1..25: mol_type = other DNA
gaaggtgaagcagaactgaccctgt

SEQ ID NO: 1669 - DNA, 25 bp, synthetic construct
  source 1..25: mol_type = other DNA
gaaggtgaagcgaaactgaccctgt

SEQ ID NO: 1670 - DNA, 25 bp, synthetic construct
  source 1..25: mol_type = other DNA
gaaggtgaagcggaactaaccctgt

SEQ ID NO: 1671 - DNA, 25 bp, synthetic construct
  source 1..25: mol_type = other DNA
gaaggtgaagcggaactgaccctat

SEQ ID NO: 1672 - DNA, 25 bp, synthetic construct
  source 1..25: mol_type = other DNA
gaaagtgaagcggaactgaccctgt

SEQ ID NO: 1673 - DNA, 25 bp, synthetic construct
  source 1..25: mol_type = other DNA
gaagatgaagcggaactgaccctgt

SEQ ID NO: 1674 - DNA, 25 bp, synthetic construct
  source 1..25: mol_type = other DNA
gaaggtaaagcggaactgaccctgt

SEQ ID NO: 1675 - DNA, 25 bp, synthetic construct
  source 1..25: mol_type = other DNA
ggaagtgaaacggaactgaccctgt

SEQ ID NO: 1676 - DNA, 25 bp, synthetic construct
  source 1..25: mol_type = other DNA
ggaagtgaagcagaactgaccctgt

SEQ ID NO: 1677 - DNA, 25 bp, synthetic construct
  source 1..25: mol_type = other DNA
ggaagtgaagcgaaactgaccctgt

SEQ ID NO: 1678 - DNA, 25 bp, synthetic construct
  source 1..25: mol_type = other DNA
ggaagtgaagcggaactaaccctgt

SEQ ID NO: 1679 - DNA, 25 bp, synthetic construct
  source 1..25: mol_type = other DNA
ggaagtgaagcggaactgaccctat

SEQ ID NO: 1680 - DNA, 25 bp, synthetic construct
  source 1..25: mol_type = other DNA
ggaaatgaagcggaactgaccctgt

SEQ ID NO: 1681 - DNA, 25 bp, synthetic construct
  source 1..25: mol_type = other DNA
ggaagtaaagcggaactgaccctgt

SEQ ID NO: 1682 - DNA, 25 bp, synthetic construct
  source 1..25: mol_type = other DNA
ggagatgaaacggaactgaccctgt

SEQ ID NO: 1683 - DNA, 25 bp, synthetic construct
  source 1..25: mol_type = other DNA
ggagatgaagcagaactgaccctgt

SEQ ID NO: 1684 - DNA, 25 bp, synthetic construct
  source 1..25: mol_type = other DNA
ggagatgaagcgaaactgaccctgt

SEQ ID NO: 1685 - DNA, 25 bp, synthetic construct
  source 1..25: mol_type = other DNA
ggagatgaagcggaactaaccctgt

SEQ ID NO: 1686 - DNA, 25 bp, synthetic construct
  source 1..25: mol_type = other DNA
ggagatgaagcggaactgaccctat

SEQ ID NO: 1687 - DNA, 25 bp, synthetic construct
  source 1..25: mol_type = other DNA
ggagataaagcggaactgaccctgt

SEQ ID NO: 1688 - DNA, 25 bp, synthetic construct
  source 1..25: mol_type = other DNA
ggaggtaaaacggaactgaccctgt

SEQ ID NO: 1689 - DNA, 25 bp, synthetic construct
  source 1..25: mol_type = other DNA
ggaggtaaagcagaactgaccctgt

SEQ ID NO: 1690 - DNA, 25 bp, synthetic construct
  source 1..25: mol_type = other DNA
ggaggtaaagcgaaactgaccctgt

SEQ ID NO: 1691 - DNA, 25 bp, synthetic construct
  source 1..25: mol_type = other DNA
ggaggtaaagcggaactaaccctgt

SEQ ID NO: 1692 - DNA, 25 bp, synthetic construct
  source 1..25: mol_type = other DNA
ggaggtaaagcggaactgaccctat

SEQ ID NO: 1693 - DNA, 25 bp, synthetic construct
  source 1..25: mol_type = other DNA
ggaggtgaagcggaactgaccctat

SEQ ID NO: 1694 - DNA, 25 bp, synthetic construct
  source 1..25: mol_type = other DNA
aggaggtgaagcggaactgaccctg

SEQ ID NO: 1695 - DNA, 25 bp, synthetic construct
  source 1..25: mol_type = other DNA
aggaggtgaatcggaactgaccctg

SEQ ID NO: 1696 - DNA, 25 bp, synthetic construct
  source 1..25: mol_type = other DNA
aggaggtgaagtggaactgaccctg

SEQ ID NO: 1697 - DNA, 25 bp, synthetic construct
  source 1..25: mol_type = other DNA
aggaggtgaagctgaactgaccctg

SEQ ID NO: 1698 - DNA, 25 bp, synthetic construct
  source 1..25: mol_type = other DNA
aggaggtgaagcgtaactgaccctg

SEQ ID NO: 1699 - DNA, 25 bp, synthetic construct
  source 1..25: mol_type = other DNA
aggaggtgaagcggaattgaccctg

SEQ ID NO: 1700 - DNA, 25 bp, synthetic construct
  source 1..25: mol_type = other DNA
aggaggtgaagcggaacttaccctg

SEQ ID NO: 1701 - DNA, 25 bp, synthetic construct
  source 1..25: mol_type = other DNA
atgaggtgaagcggaactgaccctg

SEQ ID NO: 1702 - DNA, 25 bp, synthetic construct
  source 1..25: mol_type = other DNA
aggaggtgaagcggaactgatcctg

SEQ ID NO: 1703 - DNA, 25 bp, synthetic construct
  source 1..25: mol_type = other DNA
aggaggtgaagcggaactgactctg

SEQ ID NO: 1704 - DNA, 25 bp, synthetic construct
  source 1..25: mol_type = other DNA
aggaggtgaagcggaactgaccttg

SEQ ID NO: 1705 - DNA, 25 bp, synthetic construct
  source 1..25: mol_type = other DNA
agtaggtgaagcggaactgaccctg

SEQ ID NO: 1706 - DNA, 25 bp, synthetic construct
  source 1..25: mol_type = other DNA
aggatgtgaagcggaactgaccctg

SEQ ID NO: 1707 - DNA, 25 bp, synthetic construct
  source 1..25: mol_type = other DNA
aggagttgaagcggaactgaccctg

SEQ ID NO: 1708 - DNA, 25 bp, synthetic construct
  source 1..25: mol_type = other DNA
aggaggttaagcggaactgaccctg

SEQ ID NO: 1709 - DNA, 25 bp, synthetic construct
  source 1..25: mol_type = other DNA
aggaggtgaaacagaactgaccctg

SEQ ID NO: 1710 - DNA, 25 bp, synthetic construct
  source 1..25: mol_type = other DNA
aggaggtgaaacgaaactgaccctg

SEQ ID NO: 1711 - DNA, 25 bp, synthetic construct
  source 1..25: mol_type = other DNA
aggaggtgaaacggaactaaccctg

SEQ ID NO: 1712 - DNA, 25 bp, synthetic construct
  source 1..25: mol_type = other DNA
aggaggtgaaacggaactgacccta

SEQ ID NO: 1713 - DNA, 25 bp, synthetic construct
  source 1..25: mol_type = other DNA
aggaggtgaagcaaaactgaccctg

SEQ ID NO: 1714 - DNA, 25 bp, synthetic construct
  source 1..25: mol_type = other DNA
aggaggtgaagcagaactaaccctg

SEQ ID NO: 1715 - DNA, 25 bp, synthetic construct
  source 1..25: mol_type = other DNA
aggaggtgaagcagaactgacccta

SEQ ID NO: 1716 - DNA, 25 bp, synthetic construct
  source 1..25: mol_type = other DNA
aggaggtgaagcgaaactaaccctg

SEQ ID NO: 1717 - DNA, 25 bp, synthetic construct
  source 1..25: mol_type = other DNA
aggaggtgaagcgaaactgacccta

SEQ ID NO: 1718 - DNA, 25 bp, synthetic construct
  source 1..25: mol_type = other DNA
aagaggtgaaacggaactgaccctg

SEQ ID NO: 1719 - DNA, 25 bp, synthetic construct
  source 1..25: mol_type = other DNA
aagaggtgaagcagaactgaccctg

SEQ ID NO: 1720 - DNA, 25 bp, synthetic construct
  source 1..25: mol_type = other DNA
aagaggtgaagcgaaactgaccctg

SEQ ID NO: 1721 - DNA, 25 bp, synthetic construct
  source 1..25: mol_type = other DNA
aagaggtgaagcggaactaaccctg

SEQ ID NO: 1722 - DNA, 25 bp, synthetic construct
  source 1..25: mol_type = other DNA
aagaggtgaagcggaactgacccta

SEQ ID NO: 1723 - DNA, 25 bp, synthetic construct
  source 1..25: mol_type = other DNA
aaaaggtgaagcggaactgaccctg

SEQ ID NO: 1724 - DNA, 25 bp, synthetic construct
  source 1..25: mol_type = other DNA
aagaagtgaagcggaactgaccctg

SEQ ID NO: 1725 - DNA, 25 bp, synthetic construct
  source 1..25: mol_type = other DNA
aagagatgaagcggaactgaccctg

SEQ ID NO: 1726 - DNA, 25 bp, synthetic construct
  source 1..25: mol_type = other DNA
aagaggtaaagcggaactgaccctg

SEQ ID NO: 1727 - DNA, 25 bp, synthetic construct
  source 1..25: mol_type = other DNA
agaaggtgaaacggaactgaccctg

SEQ ID NO: 1728 - DNA, 25 bp, synthetic construct
  source 1..25: mol_type = other DNA
agaaggtgaagcagaactgaccctg

SEQ ID NO: 1729 - DNA, 25 bp, synthetic construct
  source 1..25: mol_type = other DNA
agaaggtgaagcgaaactgaccctg

SEQ ID NO: 1730 - DNA, 25 bp, synthetic construct
  source 1..25: mol_type = other DNA
agaaggtgaagcggaactaaccctg

SEQ ID NO: 1731 - DNA, 25 bp, synthetic construct
  source 1..25: mol_type = other DNA
agaaggtgaagcggaactgacccta

SEQ ID NO: 1732 - DNA, 25 bp, synthetic construct
  source 1..25: mol_type = other DNA
agaaagtgaagcggaactgaccctg

SEQ ID NO: 1733 - DNA, 25 bp, synthetic construct
  source 1..25: mol_type = other DNA
agaagatgaagcggaactgaccctg

SEQ ID NO: 1734 - DNA, 25 bp, synthetic construct
  source 1..25: mol_type = other DNA
agaaggtaaagcggaactgaccctg

SEQ ID NO: 1735 - DNA, 25 bp, synthetic construct
  source 1..25: mol_type = other DNA
aggaagtgaaacggaactgaccctg

SEQ ID NO: 1736 - DNA, 25 bp, synthetic construct
  source 1..25: mol_type = other DNA
aggaagtgaagcagaactgaccctg

SEQ ID NO: 1737 - DNA, 25 bp, synthetic construct
  source 1..25: mol_type = other DNA
aggaagtgaagcgaaactgaccctg

SEQ ID NO: 1738 - DNA, 25 bp, synthetic construct
  source 1..25: mol_type = other DNA
aggaagtgaagcggaactaaccctg

SEQ ID NO: 1739 - DNA, 25 bp, synthetic construct
  source 1..25: mol_type = other DNA
aggaagtgaagcggaactgacccta

SEQ ID NO: 1740 - DNA, 25 bp, synthetic construct
  source 1..25: mol_type = other DNA
aggaaatgaagcggaactgaccctg

SEQ ID NO: 1741 - DNA, 25 bp, synthetic construct
  source 1..25: mol_type = other DNA
aggaagtaaagcggaactgaccctg

SEQ ID NO: 1742 - DNA, 25 bp, synthetic construct
  source 1..25: mol_type = other DNA
aggagatgaaacggaactgaccctg

SEQ ID NO: 1743 - DNA, 25 bp, synthetic construct
  source 1..25: mol_type = other DNA
aggagatgaagcagaactgaccctg

SEQ ID NO: 1744 - DNA, 25 bp, synthetic construct
  source 1..25: mol_type = other DNA
aggagatgaagcgaaactgaccctg

SEQ ID NO: 1745 - DNA, 25 bp, synthetic construct
  source 1..25: mol_type = other DNA
aggagatgaagcggaactaaccctg

SEQ ID NO: 1746 - DNA, 25 bp, synthetic construct
  source 1..25: mol_type = other DNA
aggagatgaagcggaactgacccta

SEQ ID NO: 1747 - DNA, 25 bp, synthetic construct
  source 1..25: mol_type = other DNA
aggagataaagcggaactgaccctg

SEQ ID NO: 1748 - DNA, 25 bp, synthetic construct
  source 1..25: mol_type = other DNA
aggaggtaaaacggaactgaccctg

SEQ ID NO: 1749 - DNA, 25 bp, synthetic construct
  source 1..25: mol_type = other DNA
aggaggtaaagcagaactgaccctg

SEQ ID NO: 1750 - DNA, 25 bp, synthetic construct
  source 1..25: mol_type = other DNA
aggaggtaaagcgaaactgaccctg

SEQ ID NO: 1751 - DNA, 25 bp, synthetic construct
  source 1..25: mol_type = other DNA
aggaggtaaagcggaactaaccctg

SEQ ID NO: 1752 - DNA, 25 bp, synthetic construct
  source 1..25: mol_type = other DNA
aggaggtaaagcggaactgacccta

SEQ ID NO: 1753 - DNA, 25 bp, synthetic construct
  source 1..25: mol_type = other DNA
aggaggtgaagcggaactgacccta

SEQ ID NO: 1754 - DNA, 25 bp, synthetic construct
  source 1..25: mol_type = other DNA
aaggaggtgaatcggaactgaccct

SEQ ID NO: 1755 - DNA, 25 bp, synthetic construct
  source 1..25: mol_type = other DNA
aaggaggtgaagtggaactgaccct

SEQ ID NO: 1756 - DNA, 25 bp, synthetic construct
  source 1..25: mol_type = other DNA
aaggaggtgaagctgaactgaccct

SEQ ID NO: 1757 - DNA, 25 bp, synthetic construct
  source 1..25: mol_type = other DNA
aaggaggtgaagcgtaactgaccct

SEQ ID NO: 1758 - DNA, 25 bp, synthetic construct
  source 1..25: mol_type = other DNA
aaggaggtgaagcggaattgaccct

SEQ ID NO: 1759 - DNA, 25 bp, synthetic construct
  source 1..25: mol_type = other DNA
aaggaggtgaagcggaacttaccct

SEQ ID NO: 1760 - DNA, 25 bp, synthetic construct
  source 1..25: mol_type = other DNA
aaggaggtgaagcggaactgatcct

SEQ ID NO: 1761 - DNA, 25 bp, synthetic construct
  source 1..25: mol_type = other DNA
aaggaggtgaagcggaactgactct

SEQ ID NO: 1762 - DNA, 25 bp, synthetic construct
  source 1..25: mol_type = other DNA
aaggaggtgaagcggaactgacctt

SEQ ID NO: 1763 - DNA, 25 bp, synthetic construct
  source 1..25: mol_type = other DNA
aatgaggtgaagcggaactgaccct

SEQ ID NO: 1764 - DNA, 25 bp, synthetic construct
  source 1..25: mol_type = other DNA
aagtaggtgaagcggaactgaccct

SEQ ID NO: 1765 - DNA, 25 bp, synthetic construct
  source 1..25: mol_type = other DNA
aaggatgtgaagcggaactgaccct

SEQ ID NO: 1766 - DNA, 25 bp, synthetic construct
  source 1..25: mol_type = other DNA
aaggagttgaagcggaactgaccct

SEQ ID NO: 1767 - DNA, 25 bp, synthetic construct
  source 1..25: mol_type = other DNA
aaggaggttaagcggaactgaccct

SEQ ID NO: 1768 - DNA, 25 bp, synthetic construct
  source 1..25: mol_type = other DNA
aaggaggtgaagcggaactaaccct

SEQ ID NO: 1769 - DNA, 25 bp, synthetic construct
  source 1..25: mol_type = other DNA
aaggaggtgaagcgaaactaaccct

SEQ ID NO: 1770 - DNA, 25 bp, synthetic construct
  source 1..25: mol_type = other DNA
aaaggaggtgaagcggaactgaccc

SEQ ID NO: 1771 - DNA, 25 bp, synthetic construct
  source 1..25: mol_type = other DNA
aaaggaggttaagcggaactgaccc

SEQ ID NO: 1772 - DNA, 25 bp, synthetic construct
  source 1..25: mol_type = other DNA
aaaggaggtgaatcggaactgaccc

SEQ ID NO: 1773 - DNA, 25 bp, synthetic construct
  source 1..25: mol_type = other DNA
aaaggaggtgaagtggaactgaccc

SEQ ID NO: 1774 - DNA, 25 bp, synthetic construct
  source 1..25: mol_type = other DNA
aaaggaggtgaagctgaactgaccc

SEQ ID NO: 1775 - DNA, 25 bp, synthetic construct
  source 1..25: mol_type = other DNA
aaaggaggtgaagcgtaactgaccc

SEQ ID NO: 1776 - DNA, 25 bp, synthetic construct
  source 1..25: mol_type = other DNA
aaaggaggtgaagcggaattgaccc

SEQ ID NO: 1777 - DNA, 25 bp, synthetic construct
  source 1..25: mol_type = other DNA
aaaggaggtgaagcggaacttaccc

SEQ ID NO: 1778 - DNA, 25 bp, synthetic construct
  source 1..25: mol_type = other DNA
aaaggaggtgaagcggaactgatcc

SEQ ID NO: 1779 - DNA, 25 bp, synthetic construct
  source 1..25: mol_type = other DNA
aaaggaggtgaagcggaactgactc

SEQ ID NO: 1780 - DNA, 25 bp, synthetic construct
  source 1..25: mol_type = other DNA
aaaggaggtgaagcggaactgacct

SEQ ID NO: 1781 - DNA, 25 bp, synthetic construct
  source 1..25: mol_type = other DNA
aaatgaggtgaagcggaactgaccc

SEQ ID NO: 1782 - DNA, 25 bp, synthetic construct
  source 1..25: mol_type = other DNA
aaagtaggtgaagcggaactgaccc

SEQ ID NO: 1783 - DNA, 25 bp, synthetic construct
  source 1..25: mol_type = other DNA
aaaggatgtgaagcggaactgaccc

SEQ ID NO: 1784 - DNA, 25 bp, synthetic construct
  source 1..25: mol_type = other DNA
aaaggagttgaagcggaactgaccc

SEQ ID NO: 1785 - DNA, 25 bp, synthetic construct
  source 1..25: mol_type = other DNA
aaaggaggtgaagcggaactaaccc

SEQ ID NO: 1786 - DNA, 25 bp, synthetic construct
  source 1..25: mol_type = other DNA
aaaggaggtgaagcgaaactaaccc

SEQ ID NO: 1787 - DNA, 25 bp, synthetic construct
  source 1..25: mol_type = other DNA
aaaaggaggtgaagcggaactgacc

SEQ ID NO: 1788 - DNA, 25 bp, synthetic construct
  source 1..25: mol_type = other DNA
aaaaggaggttaagcggaactgacc

SEQ ID NO: 1789 - DNA, 25 bp, synthetic construct
  source 1..25: mol_type = other DNA
aaaaggaggtgaatcggaactgacc

SEQ ID NO: 1790 - DNA, 25 bp, synthetic construct
  source 1..25: mol_type = other DNA
aaaaggaggtgaagtggaactgacc

SEQ ID NO: 1791 - DNA, 25 bp, synthetic construct
  source 1..25: mol_type = other DNA
aaaaggaggtgaagctgaactgacc

SEQ ID NO: 1792 - DNA, 25 bp, synthetic construct
  source 1..25: mol_type = other DNA
aaaaggaggtgaagcgtaactgacc

SEQ ID NO: 1793 - DNA, 25 bp, synthetic construct
  source 1..25: mol_type = other DNA
aaaaggaggtgaagcggaattgacc

SEQ ID NO: 1794 - DNA, 25 bp, synthetic construct
  source 1..25: mol_type = other DNA
aaaaggaggtgaagcggaacttacc

SEQ ID NO: 1795 - DNA, 25 bp, synthetic construct
  source 1..25: mol_type = other DNA
aaaaggaggtgaagcggaactgatc

SEQ ID NO: 1796 - DNA, 25 bp, synthetic construct
  source 1..25: mol_type = other DNA
aaaaggaggtgaagcggaactgact

SEQ ID NO: 1797 - DNA, 25 bp, synthetic construct
  source 1..25: mol_type = other DNA
aaaatgaggtgaagcggaactgacc

SEQ ID NO: 1798 - DNA, 25 bp, synthetic construct
  source 1..25: mol_type = other DNA
aaaagtaggtgaagcggaactgacc

SEQ ID NO: 1799 - DNA, 25 bp, synthetic construct
  source 1..25: mol_type = other DNA
aaaaggatgtgaagcggaactgacc

SEQ ID NO: 1800 - DNA, 25 bp, synthetic construct
  source 1..25: mol_type = other DNA
aaaaggagttgaagcggaactgacc

SEQ ID NO: 1801 - DNA, 25 bp, synthetic construct
  source 1..25: mol_type = other DNA
aaaaggaggtgaagcggaactaacc

SEQ ID NO: 1802 - DNA, 25 bp, synthetic construct
  source 1..25: mol_type = other DNA
aaaaggaggtgaagcgaaactaacc

SEQ ID NO: 1803 - DNA, 25 bp, synthetic construct
  source 1..25: mol_type = other DNA
taaaaggaggtgaagcggaactgac

SEQ ID NO: 1804 - DNA, 25 bp, synthetic construct
  source 1..25: mol_type = other DNA
caaaaggagttgaagcggaactgac

SEQ ID NO: 1805 - DNA, 25 bp, synthetic construct
  source 1..25: mol_type = other DNA
caaaaggaggttaagcggaactgac

SEQ ID NO: 1806 - DNA, 25 bp, synthetic construct
  source 1..25: mol_type = other DNA
caaaaggaggtgaatcggaactgac

SEQ ID NO: 1807 - DNA, 25 bp, synthetic construct
  source 1..25: mol_type = other DNA
caaaaggaggtgaagtggaactgac

SEQ ID NO: 1808 - DNA, 25 bp, synthetic construct
  source 1..25: mol_type = other DNA
caaaaggaggtgaagctgaactgac

SEQ ID NO: 1809 - DNA, 25 bp, synthetic construct
  source 1..25: mol_type = other DNA
caaaaggaggtgaagcgtaactgac

SEQ ID NO: 1810 - DNA, 25 bp, synthetic construct
  source 1..25: mol_type = other DNA
caaaaggaggtgaagcggaattgac

SEQ ID NO: 1811 - DNA, 25 bp, synthetic construct
  source 1..25: mol_type = other DNA
caaaaggaggtgaagcggaacttac

SEQ ID NO: 1812 - DNA, 25 bp, synthetic construct
  source 1..25: mol_type = other DNA
caaaaggaggtgaagcggaactgat

SEQ ID NO: 1813 - DNA, 25 bp, synthetic construct
  source 1..25: mol_type = other DNA
caaaatgaggtgaagcggaactgac

SEQ ID NO: 1814 - DNA, 25 bp, synthetic construct
  source 1..25: mol_type = other DNA
caaaagtaggtgaagcggaactgac

SEQ ID NO: 1815 - DNA, 25 bp, synthetic construct
  source 1..25: mol_type = other DNA
caaaaggatgtgaagcggaactgac

SEQ ID NO: 1816 - DNA, 25 bp, synthetic construct
  source 1..25: mol_type = other DNA
caaaaggaggtgaagcggaactaac

SEQ ID NO: 1817 - DNA, 25 bp, synthetic construct
  source 1..25: mol_type = other DNA
caaaaggaggtgaagcgaaactaac

SEQ ID NO: 1818 - DNA, 25 bp, synthetic construct
  source 1..25: mol_type = other DNA
acaaaaggaggtgaagcggaactga

SEQ ID NO: 1819 - DNA, 25 bp, synthetic construct
  source 1..25: mol_type = other DNA
acaaaaggatgtgaagcggaactga

SEQ ID NO: 1820 - DNA, 25 bp, synthetic construct
  source 1..25: mol_type = other DNA
acaaaaggagttgaagcggaactga

SEQ ID NO: 1821 - DNA, 25 bp, synthetic construct
  source 1..25: mol_type = other DNA
acaaaaggaggttaagcggaactga

SEQ ID NO: 1822 - DNA, 25 bp, synthetic construct
  source 1..25: mol_type = other DNA
acaaaaggaggtgaatcggaactga

SEQ ID NO: 1823 - DNA, 25 bp, synthetic construct
  source 1..25: mol_type = other DNA
acaaaaggaggtgaagtggaactga

SEQ ID NO: 1824 - DNA, 25 bp, synthetic construct
  source 1..25: mol_type = other DNA
acaaaaggaggtgaagctgaactga

SEQ ID NO: 1825 - DNA, 25 bp, synthetic construct
  source 1..25: mol_type = other DNA
acaaaaggaggtgaagcgtaactga

SEQ ID NO: 1826 - DNA, 25 bp, synthetic construct
  source 1..25: mol_type = other DNA
ataaaaggaggtgaagcggaactga

SEQ ID NO: 1827 - DNA, 25 bp, synthetic construct
  source 1..25: mol_type = other DNA
acaaaaggaggtgaagcggaattga

SEQ ID NO: 1828 - DNA, 25 bp, synthetic construct
  source 1..25: mol_type = other DNA
acaaaaggaggtgaagcggaactta

SEQ ID NO: 1829 - DNA, 25 bp, synthetic construct
  source 1..25: mol_type = other DNA
acaaaatgaggtgaagcggaactga

SEQ ID NO: 1830 - DNA, 25 bp, synthetic construct
  source 1..25: mol_type = other DNA
acaaaagtaggtgaagcggaactga

SEQ ID NO: 1831 - DNA, 25 bp, synthetic construct
  source 1..25: mol_type = other DNA
acaaaaggaggtgaagcggaactaa

SEQ ID NO: 1832 - DNA, 25 bp, synthetic construct
  source 1..25: mol_type = other DNA
acaaaaggaggtgaagcgaaactaa

SEQ ID NO: 1833 - DNA, 25 bp, synthetic construct
  source 1..25: mol_type = other DNA
tacaaaaggaggtgaagcggaactg

SEQ ID NO: 1834 - DNA, 25 bp, synthetic construct
  source 1..25: mol_type = other DNA
tacaaaaggatgtgaagcggaactg

SEQ ID NO: 1835 - DNA, 25 bp, synthetic construct
  source 1..25: mol_type = other DNA
tacaaaaggagttgaagcggaactg

SEQ ID NO: 1836 - DNA, 25 bp, synthetic construct
  source 1..25: mol_type = other DNA
tacaaaaggaggttaagcggaactg

SEQ ID NO: 1837 - DNA, 25 bp, synthetic construct
  source 1..25: mol_type = other DNA
tacaaaaggaggtgaatcggaactg

SEQ ID NO: 1838 - DNA, 25 bp, synthetic construct
  source 1..25: mol_type = other DNA
tacaaaaggaggtgaagtggaactg

SEQ ID NO: 1839 - DNA, 25 bp, synthetic construct
  source 1..25: mol_type = other DNA
tacaaaaggaggtgaagctgaactg

SEQ ID NO: 1840 - DNA, 25 bp, synthetic construct
  source 1..25: mol_type = other DNA
tacaaaaggaggtgaagcgtaactg

SEQ ID NO: 1841 - DNA, 25 bp, synthetic construct
  source 1..25: mol_type = other DNA
tacaaaaggaggtgaagcggaattg

SEQ ID NO: 1842 - DNA, 25 bp, synthetic construct
  source 1..25: mol_type = other DNA
tataaaaggaggtgaagcggaactg

SEQ ID NO: 1843 - DNA, 25 bp, synthetic construct
  source 1..25: mol_type = other DNA
tacaaaatgaggtgaagcggaactg

SEQ ID NO: 1844 - DNA, 25 bp, synthetic construct
  source 1..25: mol_type = other DNA
tacaaaagtaggtgaagcggaactg

SEQ ID NO: 1845 - DNA, 25 bp, synthetic construct
  source 1..25: mol_type = other DNA
tacaaaaggaggtgaagcggaacta

SEQ ID NO: 1846 - DNA, 25 bp, synthetic construct
  source 1..25: mol_type = other DNA
tacaaaaggaggtgaagcgaaacta

SEQ ID NO: 1847 - DNA, 25 bp, synthetic construct
  source 1..25: mol_type = other DNA
atacaaaagtaggtgaagcggaact

SEQ ID NO: 1848 - DNA, 25 bp, synthetic construct
  source 1..25: mol_type = other DNA
atacaaaaggatgtgaagcggaact

SEQ ID NO: 1849 - DNA, 25 bp, synthetic construct
  source 1..25: mol_type = other DNA
atacaaaaggagttgaagcggaact

SEQ ID NO: 1850 - DNA, 25 bp, synthetic construct
  source 1..25: mol_type = other DNA
atacaaaaggaggttaagcggaact

SEQ ID NO: 1851 - DNA, 25 bp, synthetic construct
  source 1..25: mol_type = other DNA
atacaaaaggaggtgaatcggaact

SEQ ID NO: 1852 - DNA, 25 bp, synthetic construct
  source 1..25: mol_type = other DNA
atacaaaaggaggtgaagtggaact

SEQ ID NO: 1853 - DNA, 25 bp, synthetic construct
  source 1..25: mol_type = other DNA
atacaaaaggaggtgaagctgaact

SEQ ID NO: 1854 - DNA, 25 bp, synthetic construct
  source 1..25: mol_type = other DNA
atacaaaaggaggtgaagcgtaact

SEQ ID NO: 1855 - DNA, 25 bp, synthetic construct
  source 1..25: mol_type = other DNA
atacaaaaggaggtgaagcggaatt

SEQ ID NO: 1856 - DNA, 25 bp, synthetic construct
  source 1..25: mol_type = other DNA
atataaaaggaggtgaagcggaact

SEQ ID NO: 1857 - DNA, 25 bp, synthetic construct
  source 1..25: mol_type = other DNA
atacaaaatgaggtgaagcggaact

SEQ ID NO: 1858 - DNA, 25 bp, synthetic construct
  source 1..25: mol_type = other DNA
atacaaaaggaggtgaaacgaaact

SEQ ID NO: 1859 - DNA, 25 bp, synthetic construct
  source 1..25: mol_type = other DNA
atacaaaaggaggtgaagcgaaact

SEQ ID NO: 1860 - DNA, 25 bp, synthetic construct
  source 1..25: mol_type = other DNA
atacaaaaggaggtgaagcaaaact

SEQ ID NO: 1861 - DNA, 18 bp, synthetic construct
  source 1..18: mol_type = other DNA
taaaaacccaaatttaac

SEQ ID NO: 1862 - DNA, 18 bp, synthetic construct
  source 1..18: mol_type = other DNA
taaaaacccaaattgaat

SEQ ID NO: 1863 - DNA, 18 bp, synthetic construct
  source 1..18: mol_type = other DNA
taaaaatccaaattgaac

SEQ ID NO: 1864 - DNA, 18 bp, synthetic construct
  source 1..18: mol_type = other DNA
taaaaactcaaattgaac

SEQ ID NO: 1865 - DNA, 18 bp, synthetic construct
  source 1..18: mol_type = other DNA
taaaaacctaaattgaac

SEQ ID NO: 1866 - DNA, 18 bp, synthetic construct
  source 1..18: mol_type = other DNA
ttaaaaacctaaattgaa

SEQ ID NO: 1867 - DNA, 18 bp, synthetic construct
  source 1..18: mol_type = other DNA
ttaaaaacccaaatttaa

SEQ ID NO: 1868 - DNA, 18 bp, synthetic construct
  source 1..18: mol_type = other DNA
ttaaaaatccaaattgaa

SEQ ID NO: 1869 - DNA, 18 bp, synthetic construct
  source 1..18: mol_type = other DNA
ttaaaaactcaaattgaa

SEQ ID NO: 1870 - DNA, 18 bp, synthetic construct
  source 1..18: mol_type = other DNA
tttaaaaacccaaattga

SEQ ID NO: 1871 - DNA, 18 bp, synthetic construct
  source 1..18: mol_type = other DNA
gttaaaaactcaaattga

SEQ ID NO: 1872 - DNA, 18 bp, synthetic construct
  source 1..18: mol_type = other DNA
gttaaaaacctaaattga

SEQ ID NO: 1873 - DNA, 18 bp, synthetic construct
  source 1..18: mol_type = other DNA
gttaaaaacccaaattta

SEQ ID NO: 1874 - DNA, 18 bp, synthetic construct
  source 1..18: mol_type = other DNA
gttaaaaatccaaattga

SEQ ID NO: 1875 - DNA, 18 bp, synthetic construct
  source 1..18: mol_type = other DNA
agttaaaaatccaaattg

SEQ ID NO: 1876 - DNA, 18 bp, synthetic construct
  source 1..18: mol_type = other DNA
agttaaaaactcaaattg

SEQ ID NO: 1877 - DNA, 18 bp, synthetic construct
  source 1..18: mol_type = other DNA
agttaaaaacctaaattg

SEQ ID NO: 1878 - DNA, 18 bp, synthetic construct
  source 1..18: mol_type = other DNA
agttaaaaacccaaattt

SEQ ID NO: 1879 - DNA, 18 bp, synthetic construct
  source 1..18: mol_type = other DNA
atttaaaaacccaaattg

SEQ ID NO: 1880 - DNA, 18 bp, synthetic construct
  source 1..18: mol_type = other DNA
aagttaaaaatccaaatt

SEQ ID NO: 1881 - DNA, 18 bp, synthetic construct
  source 1..18: mol_type = other DNA
aagttaaaaactcaaatt

SEQ ID NO: 1882 - DNA, 18 bp, synthetic construct
  source 1..18: mol_type = other DNA
aagttaaaaacctaaatt

SEQ ID NO: 1883 - DNA, 18 bp, synthetic construct
  source 1..18: mol_type = other DNA
aatttaaaaacccaaatt

SEQ ID NO: 1884 - DNA, 18 bp, synthetic construct
  source 1..18: mol_type = other DNA
aaagttaaaaatccaaat

SEQ ID NO: 1885 - DNA, 18 bp, synthetic construct
  source 1..18: mol_type = other DNA
aaagttaaaaactcaaat

SEQ ID NO: 1886 - DNA, 18 bp, synthetic construct
  source 1..18: mol_type = other DNA
aaagttaaaaacctaaat

SEQ ID NO: 1887 - DNA, 18 bp, synthetic construct
  source 1..18: mol_type = other DNA
aaatttaaaaacccaaat

SEQ ID NO: 1888 - DNA, 18 bp, synthetic construct
  source 1..18: mol_type = other DNA
taaagttaaaaatccaaa

SEQ ID NO: 1889 - DNA, 18 bp, synthetic construct
  source 1..18: mol_type = other DNA
taaagttaaaaactcaaa

SEQ ID NO: 1890 - DNA, 18 bp, synthetic construct
  source 1..18: mol_type = other DNA
taaagttaaaaacctaaa

SEQ ID NO: 1891 - DNA, 18 bp, synthetic construct
  source 1..18: mol_type = other DNA
taaatttaaaaacccaaa

SEQ ID NO: 1892 - DNA, 18 bp, synthetic construct
  source 1..18: mol_type = other DNA
ttaaagttaaaaacccaa

SEQ ID NO: 1893 - DNA, 18 bp, synthetic construct
  source 1..18: mol_type = other DNA
gtaaagttaaaaatccaa

SEQ ID NO: 1894 - DNA, 18 bp, synthetic construct
  source 1..18: mol_type = other DNA
gtaaagttaaaaactcaa

SEQ ID NO: 1895 - DNA, 18 bp, synthetic construct
  source 1..18: mol_type = other DNA
gtaaagttaaaaacctaa

SEQ ID NO: 1896 - DNA, 18 bp, synthetic construct
  source 1..18: mol_type = other DNA
gtaaatttaaaaacccaa

SEQ ID NO: 1897 - DNA, 18 bp, synthetic construct
  source 1..18: mol_type = other DNA
tgtaaagttaaaaatcca

SEQ ID NO: 1898 - DNA, 18 bp, synthetic construct
  source 1..18: mol_type = other DNA
tgtaaagttaaaaactca

SEQ ID NO: 1899 - DNA, 18 bp, synthetic construct
  source 1..18: mol_type = other DNA
tgtaaagttaaaaaccta

SEQ ID NO: 1900 - DNA, 18 bp, synthetic construct
  source 1..18: mol_type = other DNA
tttaaagttaaaaaccca

SEQ ID NO: 1901 - DNA, 18 bp, synthetic construct
  source 1..18: mol_type = other DNA
tgtaaatttaaaaaccca

SEQ ID NO: 1902 - DNA, 18 bp, synthetic construct
  source 1..18: mol_type = other DNA
ttgtaaagttaaaaaccc

SEQ ID NO: 1903 - DNA, 18 bp, synthetic construct
  source 1..18: mol_type = other DNA
ctgtaaagttaaaaatcc

SEQ ID NO: 1904 - DNA, 18 bp, synthetic construct
  source 1..18: mol_type = other DNA
ctgtaaagttaaaaactc

SEQ ID NO: 1905 - DNA, 18 bp, synthetic construct
  source 1..18: mol_type = other DNA
ctgtaaagttaaaaacct

SEQ ID NO: 1906 - DNA, 18 bp, synthetic construct
  source 1..18: mol_type = other DNA
ctttaaagttaaaaaccc

SEQ ID NO: 1907 - DNA, 18 bp, synthetic construct
  source 1..18: mol_type = other DNA
ctgtaaatttaaaaaccc

SEQ ID NO: 1908 - DNA, 18 bp, synthetic construct
  source 1..18: mol_type = other DNA
tctgtaaagttaaaaacc

SEQ ID NO: 1909 - DNA, 18 bp, synthetic construct
  source 1..18: mol_type = other DNA
cctgtaaagttaaaaatc

SEQ ID NO: 1910 - DNA, 18 bp, synthetic construct
  source 1..18: mol_type = other DNA
cctgtaaagttaaaaact

SEQ ID NO: 1911 - DNA, 18 bp, synthetic construct
  source 1..18: mol_type = other DNA
cttgtaaagttaaaaacc

SEQ ID NO: 1912 - DNA, 18 bp, synthetic construct
  source 1..18: mol_type = other DNA
cctttaaagttaaaaacc

SEQ ID NO: 1913 - DNA, 18 bp, synthetic construct
  source 1..18: mol_type = other DNA
cctgtaaatttaaaaacc

SEQ ID NO: 1914 - DNA, 18 bp, synthetic construct
  source 1..18: mol_type = other DNA
tcctgtaaagttaaaaac

SEQ ID NO: 1915 - DNA, 18 bp, synthetic construct
  source 1..18: mol_type = other DNA
ccctgtaaatttaaaaac

SEQ ID NO: 1916 - DNA, 18 bp, synthetic construct
  source 1..18: mol_type = other DNA
ccctgtaaagttaaaaat

SEQ ID NO: 1917 - DNA, 18 bp, synthetic construct
  source 1..18: mol_type = other DNA
ctctgtaaagttaaaaac

SEQ ID NO: 1918 - DNA, 18 bp, synthetic construct
  source 1..18: mol_type = other DNA
ccttgtaaagttaaaaac

SEQ ID NO: 1919 - DNA, 18 bp, synthetic construct
  source 1..18: mol_type = other DNA
ccctttaaagttaaaaac

SEQ ID NO: 1920 - DNA, 18 bp, synthetic construct
  source 1..18: mol_type = other DNA
accctgtaaatttaaaaa

SEQ ID NO: 1921 - DNA, 18 bp, synthetic construct
  source 1..18: mol_type = other DNA
atcctgtaaagttaaaaa

SEQ ID NO: 1922 - DNA, 18 bp, synthetic construct
  source 1..18: mol_type = other DNA
actctgtaaagttaaaaa

SEQ ID NO: 1923 - DNA, 18 bp, synthetic construct
  source 1..18: mol_type = other DNA
accttgtaaagttaaaaa

SEQ ID NO: 1924 - DNA, 18 bp, synthetic construct
  source 1..18: mol_type = other DNA
accctttaaagttaaaaa

SEQ ID NO: 1925 - DNA, 18 bp, synthetic construct
  source 1..18: mol_type = other DNA
taccctgtaaagttaaaa

SEQ ID NO: 1926 - DNA, 18 bp, synthetic construct
  source 1..18: mol_type = other DNA
gaccctgtaaatttaaaa

SEQ ID NO: 1927 - DNA, 18 bp, synthetic construct
  source 1..18: mol_type = other DNA
gatcctgtaaagttaaaa

SEQ ID NO: 1928 - DNA, 18 bp, synthetic construct
  source 1..18: mol_type = other DNA
gactctgtaaagttaaaa

SEQ ID NO: 1929 - DNA, 18 bp, synthetic construct
  source 1..18: mol_type = other DNA
gaccttgtaaagttaaaa

SEQ ID NO: 1930 - DNA, 18 bp, synthetic construct
  source 1..18: mol_type = other DNA
gaccctttaaagttaaaa

SEQ ID NO: 1931 - DNA, 18 bp, synthetic construct
  source 1..18: mol_type = other DNA
tgaccctgtaaagttaaa

SEQ ID NO: 1932 - DNA, 18 bp, synthetic construct
  source 1..18: mol_type = other DNA
tgaccctgtaaatttaaa

SEQ ID NO: 1933 - DNA, 18 bp, synthetic construct
  source 1..18: mol_type = other DNA
ttaccctgtaaagttaaa

SEQ ID NO: 1934 - DNA, 18 bp, synthetic construct
  source 1..18: mol_type = other DNA
tgatcctgtaaagttaaa

SEQ ID NO: 1935 - DNA, 18 bp, synthetic construct
  source 1..18: mol_type = other DNA
tgactctgtaaagttaaa

SEQ ID NO: 1936 - DNA, 18 bp, synthetic construct
  source 1..18: mol_type = other DNA
tgaccttgtaaagttaaa

SEQ ID NO: 1937 - DNA, 18 bp, synthetic construct
  source 1..18: mol_type = other DNA
tgaccctttaaagttaaa

SEQ ID NO: 1938 - DNA, 18 bp, synthetic construct
  source 1..18: mol_type = other DNA
tgaccctgtaaaattaaa

SEQ ID NO: 1939 - DNA, 18 bp, synthetic construct
  source 1..18: mol_type = other DNA
ctgaccctgtaaagttaa

SEQ ID NO: 1940 - DNA, 18 bp, synthetic construct
  source 1..18: mol_type = other DNA
ttgaccctgtaaagttaa

SEQ ID NO: 1941 - DNA, 18 bp, synthetic construct
  source 1..18: mol_type = other DNA
ctgaccctgtaaatttaa

SEQ ID NO: 1942 - DNA, 18 bp, synthetic construct
  source 1..18: mol_type = other DNA
cttaccctgtaaagttaa

SEQ ID NO: 1943 - DNA, 18 bp, synthetic construct
  source 1..18: mol_type = other DNA
ctgatcctgtaaagttaa

SEQ ID NO: 1944 - DNA, 18 bp, synthetic construct
  source 1..18: mol_type = other DNA
ctgactctgtaaagttaa

SEQ ID NO: 1945 - DNA, 18 bp, synthetic construct
  source 1..18: mol_type = other DNA
ctgaccttgtaaagttaa

SEQ ID NO: 1946 - DNA, 18 bp, synthetic construct
  source 1..18: mol_type = other DNA
ctgaccctttaaagttaa

SEQ ID NO: 1947 - DNA, 18 bp, synthetic construct
  source 1..18: mol_type = other DNA
ctgaccctgtaaaattaa

SEQ ID NO: 1948 - DNA, 18 bp, synthetic construct
  source 1..18: mol_type = other DNA
actgaccctgtaaagtta

SEQ ID NO: 1949 - DNA, 18 bp, synthetic construct
  source 1..18: mol_type = other DNA
actgaccctttaaagtta

SEQ ID NO: 1950 - DNA, 18 bp, synthetic construct
  source 1..18: mol_type = other DNA
actgaccctgtaaattta

SEQ ID NO: 1951 - DNA, 18 bp, synthetic construct
  source 1..18: mol_type = other DNA
attgaccctgtaaagtta

SEQ ID NO: 1952 - DNA, 18 bp, synthetic construct
  source 1..18: mol_type = other DNA
acttaccctgtaaagtta

SEQ ID NO: 1953 - DNA, 18 bp, synthetic construct
  source 1..18: mol_type = other DNA
actgatcctgtaaagtta

SEQ ID NO: 1954 - DNA, 18 bp, synthetic construct
  source 1..18: mol_type = other DNA
actgactctgtaaagtta

SEQ ID NO: 1955 - DNA, 18 bp, synthetic construct
  source 1..18: mol_type = other DNA
actgaccttgtaaagtta

SEQ ID NO: 1956 - DNA, 18 bp, synthetic construct
  source 1..18: mol_type = other DNA
actgaccctgtaaaatta

SEQ ID NO: 1957 - DNA, 18 bp, synthetic construct
  source 1..18: mol_type = other DNA
aactgaccctgtaaagtt

SEQ ID NO: 1958 - DNA, 18 bp, synthetic construct
  source 1..18: mol_type = other DNA
aactgaccctttaaagtt

SEQ ID NO: 1959 - DNA, 18 bp, synthetic construct
  source 1..18: mol_type = other DNA
aactgaccctgtaaattt

SEQ ID NO: 1960 - DNA, 18 bp, synthetic construct
  source 1..18: mol_type = other DNA
aattgaccctgtaaagtt

SEQ ID NO: 1961 - DNA, 18 bp, synthetic construct
  source 1..18: mol_type = other DNA
aacttaccctgtaaagtt

SEQ ID NO: 1962 - DNA, 18 bp, synthetic construct
  source 1..18: mol_type = other DNA
aactgatcctgtaaagtt

SEQ ID NO: 1963 - DNA, 18 bp, synthetic construct
  source 1..18: mol_type = other DNA
aactgactctgtaaagtt

SEQ ID NO: 1964 - DNA, 18 bp, synthetic construct
  source 1..18: mol_type = other DNA
aactgaccttgtaaagtt

SEQ ID NO: 1965 - DNA, 18 bp, synthetic construct
  source 1..18: mol_type = other DNA
aactgaccctgtaaaatt

SEQ ID NO: 1966 - DNA, 18 bp, synthetic construct
  source 1..18: mol_type = other DNA
gaactgaccctgtaaagt

SEQ ID NO: 1967 - DNA, 18 bp, synthetic construct
  source 1..18: mol_type = other DNA
taactgaccctgtaaagt

SEQ ID NO: 1968 - DNA, 18 bp, synthetic construct
  source 1..18: mol_type = other DNA
gaactgaccttgtaaagt

SEQ ID NO: 1969 - DNA, 18 bp, synthetic construct
  source 1..18: mol_type = other DNA
gaactgaccctttaaagt

SEQ ID NO: 1970 - DNA, 18 bp, synthetic construct
  source 1..18: mol_type = other DNA
gaactgaccctgtaaatt

SEQ ID NO: 1971 - DNA, 18 bp, synthetic construct
  source 1..18: mol_type = other DNA
gaattgaccctgtaaagt

SEQ ID NO: 1972 - DNA, 18 bp, synthetic construct
  source 1..18: mol_type = other DNA
gaacttaccctgtaaagt

SEQ ID NO: 1973 - DNA, 18 bp, synthetic construct
  source 1..18: mol_type = other DNA
gaactgatcctgtaaagt

SEQ ID NO: 1974 - DNA, 18 bp, synthetic construct
  source 1..18: mol_type = other DNA
gaactgactctgtaaagt

SEQ ID NO: 1975 - DNA, 18 bp, synthetic construct
  source 1..18: mol_type = other DNA
gaactgaccctgtaaaat

SEQ ID NO: 1976 - DNA, 18 bp, synthetic construct
  source 1..18: mol_type = other DNA
ggaactgaccctgtaaag

SEQ ID NO: 1977 - DNA, 18 bp, synthetic construct
  source 1..18: mol_type = other DNA
tgaactgaccctgtaaag

SEQ ID NO: 1978 - DNA, 18 bp, synthetic construct
  source 1..18: mol_type = other DNA
ggaactgactctgtaaag

SEQ ID NO: 1979 - DNA, 18 bp, synthetic construct
  source 1..18: mol_type = other DNA
ggaactgaccttgtaaag

SEQ ID NO: 1980 - DNA, 18 bp, synthetic construct
  source 1..18: mol_type = other DNA
ggaactgaccctttaaag

SEQ ID NO: 1981 - DNA, 18 bp, synthetic construct
  source 1..18: mol_type = other DNA
ggaactgaccctgtaaat

SEQ ID NO: 1982 - DNA, 18 bp, synthetic construct
  source 1..18: mol_type = other DNA
gtaactgaccctgtaaag

SEQ ID NO: 1983 - DNA, 18 bp, synthetic construct
  source 1..18: mol_type = other DNA
ggaattgaccctgtaaag

SEQ ID NO: 1984 - DNA, 18 bp, synthetic construct
  source 1..18: mol_type = other DNA
ggaacttaccctgtaaag

SEQ ID NO: 1985 - DNA, 18 bp, synthetic construct
  source 1..18: mol_type = other DNA
ggaactgatcctgtaaag

SEQ ID NO: 1986 - DNA, 18 bp, synthetic construct
  source 1..18: mol_type = other DNA
ggaactgaccctgtaaaa

SEQ ID NO: 1987 - DNA, 18 bp, synthetic construct
  source 1..18: mol_type = other DNA
cggaactgaccctgtaaa

SEQ ID NO: 1988 - DNA, 18 bp, synthetic construct
  source 1..18: mol_type = other DNA
tggaactgaccctgtaaa

SEQ ID NO: 1989 - DNA, 18 bp, synthetic construct
  source 1..18: mol_type = other DNA
cggaactgatcctgtaaa

SEQ ID NO: 1990 - DNA, 18 bp, synthetic construct
  source 1..18: mol_type = other DNA
cggaactgactctgtaaa

SEQ ID NO: 1991 - DNA, 18 bp, synthetic construct
  source 1..18: mol_type = other DNA
cggaactgaccttgtaaa

SEQ ID NO: 1992 - DNA, 18 bp, synthetic construct
  source 1..18: mol_type = other DNA
cggaactgaccctttaaa

SEQ ID NO: 1993 - DNA, 18 bp, synthetic construct
  source 1..18: mol_type = other DNA
ctgaactgaccctgtaaa

SEQ ID NO: 1994 - DNA, 18 bp, synthetic construct
  source 1..18: mol_type = other DNA
cgtaactgaccctgtaaa

SEQ ID NO: 1995 - DNA, 18 bp, synthetic construct
  source 1..18: mol_type = other DNA
cggaattgaccctgtaaa

SEQ ID NO: 1996 - DNA, 18 bp, synthetic construct
  source 1..18: mol_type = other DNA
cggaacttaccctgtaaa

SEQ ID NO: 1997 - DNA, 18 bp, synthetic construct
  source 1..18: mol_type = other DNA
cggaactgaccctataaa

SEQ ID NO: 1998 - DNA, 18 bp, synthetic construct
  source 1..18: mol_type = other DNA
gcggaactgaccctgtaa

SEQ ID NO: 1999 - DNA, 18 bp, synthetic construct
  source 1..18: mol_type = other DNA
tcggaactgaccctgtaa

SEQ ID NO: 2000 - DNA, 18 bp, synthetic construct
  source 1..18: mol_type = other DNA
gcggaactgatcctgtaa

SEQ ID NO: 2001 - DNA, 18 bp, synthetic construct
  source 1..18: mol_type = other DNA
gcggaactgactctgtaa

SEQ ID NO: 2002 - DNA, 18 bp, synthetic construct
  source 1..18: mol_type = other DNA
gcggaactgaccttgtaa

SEQ ID NO: 2003 - DNA, 18 bp, synthetic construct
  source 1..18: mol_type = other DNA
gcggaactgaccctttaa

SEQ ID NO: 2004 - DNA, 18 bp, synthetic construct
  source 1..18: mol_type = other DNA
gtggaactgaccctgtaa

SEQ ID NO: 2005 - DNA, 18 bp, synthetic construct
  source 1..18: mol_type = other DNA
gctgaactgaccctgtaa

SEQ ID NO: 2006 - DNA, 18 bp, synthetic construct
  source 1..18: mol_type = other DNA
gcgtaactgaccctgtaa

SEQ ID NO: 2007 - DNA, 18 bp, synthetic construct
  source 1..18: mol_type = other DNA
gcggaattgaccctgtaa

SEQ ID NO: 2008 - DNA, 18 bp, synthetic construct
  source 1..18: mol_type = other DNA
gcggaacttaccctgtaa

SEQ ID NO: 2009 - DNA, 18 bp, synthetic construct
  source 1..18: mol_type = other DNA
gcggaactgaccctataa

SEQ ID NO: 2010 - DNA, 18 bp, synthetic construct
  source 1..18: mol_type = other DNA
agcggaactgaccctgta

SEQ ID NO: 2011 - DNA, 18 bp, synthetic construct
  source 1..18: mol_type = other DNA
agcggaacttaccctgta

SEQ ID NO: 2012 - DNA, 18 bp, synthetic construct
  source 1..18: mol_type = other DNA
agcggaactgatcctgta

SEQ ID NO: 2013 - DNA, 18 bp, synthetic construct
  source 1..18: mol_type = other DNA
agcggaactgactctgta

SEQ ID NO: 2014 - DNA, 18 bp, synthetic construct
  source 1..18: mol_type = other DNA
agcggaactgaccttgta

SEQ ID NO: 2015 - DNA, 18 bp, synthetic construct
  source 1..18: mol_type = other DNA
agcggaactgacccttta

SEQ ID NO: 2016 - DNA, 18 bp, synthetic construct
  source 1..18: mol_type = other DNA
atcggaactgaccctgta

SEQ ID NO: 2017 - DNA, 18 bp, synthetic construct
  source 1..18: mol_type = other DNA
agtggaactgaccctgta

SEQ ID NO: 2018 - DNA, 18 bp, synthetic construct
  source 1..18: mol_type = other DNA
agctgaactgaccctgta

SEQ ID NO: 2019 - DNA, 18 bp, synthetic construct
  source 1..18: mol_type = other DNA
agcgtaactgaccctgta

SEQ ID NO: 2020 - DNA, 18 bp, synthetic construct
  source 1..18: mol_type = other DNA
agcggaattgaccctgta

SEQ ID NO: 2021 - DNA, 18 bp, synthetic construct
  source 1..18: mol_type = other DNA
agcggaactgaccctata

SEQ ID NO: 2022 - DNA, 18 bp, synthetic construct
  source 1..18: mol_type = other DNA
aagcggaactgaccctgt

SEQ ID NO: 2023 - DNA, 18 bp, synthetic construct
  source 1..18: mol_type = other DNA
aagcggaacttaccctgt

SEQ ID NO: 2024 - DNA, 18 bp, synthetic construct
  source 1..18: mol_type = other DNA
aagcggaactgatcctgt

SEQ ID NO: 2025 - DNA, 18 bp, synthetic construct
  source 1..18: mol_type = other DNA
aagcggaactgactctgt

SEQ ID NO: 2026 - DNA, 18 bp, synthetic construct
  source 1..18: mol_type = other DNA
aagcggaactgaccttgt

SEQ ID NO: 2027 - DNA, 18 bp, synthetic construct
  source 1..18: mol_type = other DNA
aagcggaactgacccttt

SEQ ID NO: 2028 - DNA, 18 bp, synthetic construct
  source 1..18: mol_type = other DNA
aatcggaactgaccctgt

SEQ ID NO: 2029 - DNA, 18 bp, synthetic construct
  source 1..18: mol_type = other DNA
aagtggaactgaccctgt

SEQ ID NO: 2030 - DNA, 18 bp, synthetic construct
  source 1..18: mol_type = other DNA
aagctgaactgaccctgt

SEQ ID NO: 2031 - DNA, 18 bp, synthetic construct
  source 1..18: mol_type = other DNA
aagcgtaactgaccctgt

SEQ ID NO: 2032 - DNA, 18 bp, synthetic construct
  source 1..18: mol_type = other DNA
aagcggaattgaccctgt

SEQ ID NO: 2033 - DNA, 18 bp, synthetic construct
  source 1..18: mol_type = other DNA
aagcggaactgaccctat

SEQ ID NO: 2034 - DNA, 18 bp, synthetic construct
  source 1..18: mol_type = other DNA
gaagcggaactgaccctg

SEQ ID NO: 2035 - DNA, 18 bp, synthetic construct
  source 1..18: mol_type = other DNA
taagcggaactgaccctg

SEQ ID NO: 2036 - DNA, 18 bp, synthetic construct
  source 1..18: mol_type = other DNA
gaagcggaattgaccctg

SEQ ID NO: 2037 - DNA, 18 bp, synthetic construct
  source 1..18: mol_type = other DNA
gaagcggaacttaccctg

SEQ ID NO: 2038 - DNA, 18 bp, synthetic construct
  source 1..18: mol_type = other DNA
gaagcggaactgatcctg

SEQ ID NO: 2039 - DNA, 18 bp, synthetic construct
  source 1..18: mol_type = other DNA
gaagcggaactgactctg

SEQ ID NO: 2040 - DNA, 18 bp, synthetic construct
  source 1..18: mol_type = other DNA
gaagcggaactgaccttg

SEQ ID NO: 2041 - DNA, 18 bp, synthetic construct
  source 1..18: mol_type = other DNA
gaagcggaactgaccctt

SEQ ID NO: 2042 - DNA, 18 bp, synthetic construct
  source 1..18: mol_type = other DNA
gaatcggaactgaccctg

SEQ ID NO: 2043 - DNA, 18 bp, synthetic construct
  source 1..18: mol_type = other DNA
gaagtggaactgaccctg

SEQ ID NO: 2044 - DNA, 18 bp, synthetic construct
  source 1..18: mol_type = other DNA
gaagctgaactgaccctg

SEQ ID NO: 2045 - DNA, 18 bp, synthetic construct
  source 1..18: mol_type = other DNA
gaagcgtaactgaccctg

SEQ ID NO: 2046 - DNA, 18 bp, synthetic construct
  source 1..18: mol_type = other DNA
gaagcggaactgacccta

SEQ ID NO: 2047 - DNA, 18 bp, synthetic construct
  source 1..18: mol_type = other DNA
tgaagcggaactgaccct

SEQ ID NO: 2048 - DNA, 18 bp, synthetic construct
  source 1..18: mol_type = other DNA
tgaagcggaattgaccct

SEQ ID NO: 2049 - DNA, 18 bp, synthetic construct
  source 1..18: mol_type = other DNA
tgaagcggaacttaccct

SEQ ID NO: 2050 - DNA, 18 bp, synthetic construct
  source 1..18: mol_type = other DNA
tgaagcggaactgatcct

SEQ ID NO: 2051 - DNA, 18 bp, synthetic construct
  source 1..18: mol_type = other DNA
tgaagcggaactgactct

SEQ ID NO: 2052 - DNA, 18 bp, synthetic construct
  source 1..18: mol_type = other DNA
tgaagcggaactgacctt

SEQ ID NO: 2053 - DNA, 18 bp, synthetic construct
  source 1..18: mol_type = other DNA
ttaagcggaactgaccct

SEQ ID NO: 2054 - DNA, 18 bp, synthetic construct
  source 1..18: mol_type = other DNA
tgaatcggaactgaccct

SEQ ID NO: 2055 - DNA, 18 bp, synthetic construct
  source 1..18: mol_type = other DNA
tgaagtggaactgaccct

SEQ ID NO: 2056 - DNA, 18 bp, synthetic construct
  source 1..18: mol_type = other DNA
tgaagctgaactgaccct

SEQ ID NO: 2057 - DNA, 18 bp, synthetic construct
  source 1..18: mol_type = other DNA
tgaagcgtaactgaccct

SEQ ID NO: 2058 - DNA, 18 bp, synthetic construct
  source 1..18: mol_type = other DNA
tgaagcggaactaaccct

SEQ ID NO: 2059 - DNA, 18 bp, synthetic construct
  source 1..18: mol_type = other DNA
gtgaagcggaactgaccc

SEQ ID NO: 2060 - DNA, 18 bp, synthetic construct
  source 1..18: mol_type = other DNA
ttgaagcggaactgaccc

SEQ ID NO: 2061 - DNA, 18 bp, synthetic construct
  source 1..18: mol_type = other DNA
gtgaagcggaattgaccc

SEQ ID NO: 2062 - DNA, 18 bp, synthetic construct
  source 1..18: mol_type = other DNA
gtgaagcggaacttaccc

SEQ ID NO: 2063 - DNA, 18 bp, synthetic construct
  source 1..18: mol_type = other DNA
gtgaagcggaactgatcc

SEQ ID NO: 2064 - DNA, 18 bp, synthetic construct
  source 1..18: mol_type = other DNA
gtgaagcggaactgactc

SEQ ID NO: 2065 - DNA, 18 bp, synthetic construct
  source 1..18: mol_type = other DNA
gtgaagcggaactgacct

SEQ ID NO: 2066 - DNA, 18 bp, synthetic construct
  source 1..18: mol_type = other DNA
gttaagcggaactgaccc

SEQ ID NO: 2067 - DNA, 18 bp, synthetic construct
  source 1..18: mol_type = other DNA
gtgaatcggaactgaccc

SEQ ID NO: 2068 - DNA, 18 bp, synthetic construct
  source 1..18: mol_type = other DNA
gtgaagtggaactgaccc

SEQ ID NO: 2069 - DNA, 18 bp, synthetic construct
  source 1..18: mol_type = other DNA
gtgaagctgaactgaccc

SEQ ID NO: 2070 - DNA, 18 bp, synthetic construct
  source 1..18: mol_type = other DNA
gtgaagcgtaactgaccc

SEQ ID NO: 2071 - DNA, 18 bp, synthetic construct
  source 1..18: mol_type = other DNA
gtgaagcggaactaaccc

SEQ ID NO: 2072 - DNA, 18 bp, synthetic construct
  source 1..18: mol_type = other DNA
ggtgaagcggaactgacc

SEQ ID NO: 2073 - DNA, 18 bp, synthetic construct
  source 1..18: mol_type = other DNA
tgtgaagcggaactgacc

SEQ ID NO: 2074 - DNA, 18 bp, synthetic construct
  source 1..18: mol_type = other DNA
ggtgaagcgtaactgacc

SEQ ID NO: 2075 - DNA, 18 bp, synthetic construct
  source 1..18: mol_type = other DNA
ggtgaagcggaattgacc

SEQ ID NO: 2076 - DNA, 18 bp, synthetic construct
  source 1..18: mol_type = other DNA
ggtgaagcggaacttacc

SEQ ID NO: 2077 - DNA, 18 bp, synthetic construct
  source 1..18: mol_type = other DNA
ggtgaagcggaactgatc

SEQ ID NO: 2078 - DNA, 18 bp, synthetic construct
  source 1..18: mol_type = other DNA
ggtgaagcggaactgact

SEQ ID NO: 2079 - DNA, 18 bp, synthetic construct
  source 1..18: mol_type = other DNA
gttgaagcggaactgacc

SEQ ID NO: 2080 - DNA, 18 bp, synthetic construct
  source 1..18: mol_type = other DNA
ggttaagcggaactgacc

SEQ ID NO: 2081 - DNA, 18 bp, synthetic construct
  source 1..18: mol_type = other DNA
ggtgaatcggaactgacc

SEQ ID NO: 2082 - DNA, 18 bp, synthetic construct
  source 1..18: mol_type = other DNA
ggtgaagtggaactgacc

SEQ ID NO: 2083 - DNA, 18 bp, synthetic construct
  source 1..18: mol_type = other DNA
ggtgaagctgaactgacc

SEQ ID NO: 2084 - DNA, 18 bp, synthetic construct
  source 1..18: mol_type = other DNA
ggtgaagcggaactaacc

SEQ ID NO: 2085 - DNA, 18 bp, synthetic construct
  source 1..18: mol_type = other DNA
aggtgaagcggaactgac

SEQ ID NO: 2086 - DNA, 18 bp, synthetic construct
  source 1..18: mol_type = other DNA
aggtgaagctgaactgac

SEQ ID NO: 2087 - DNA, 18 bp, synthetic construct
  source 1..18: mol_type = other DNA
aggtgaagcgtaactgac

SEQ ID NO: 2088 - DNA, 18 bp, synthetic construct
  source 1..18: mol_type = other DNA
aggtgaagcggaattgac

SEQ ID NO: 2089 - DNA, 18 bp, synthetic construct
  source 1..18: mol_type = other DNA
aggtgaagcggaacttac

SEQ ID NO: 2090 - DNA, 18 bp, synthetic construct
  source 1..18: mol_type = other DNA
aggtgaagcggaactgat

SEQ ID NO: 2091 - DNA, 18 bp, synthetic construct
  source 1..18: mol_type = other DNA
atgtgaagcggaactgac

SEQ ID NO: 2092 - DNA, 18 bp, synthetic construct
  source 1..18: mol_type = other DNA
agttgaagcggaactgac

SEQ ID NO: 2093 - DNA, 18 bp, synthetic construct
  source 1..18: mol_type = other DNA
aggttaagcggaactgac

SEQ ID NO: 2094 - DNA, 18 bp, synthetic construct
  source 1..18: mol_type = other DNA
aggtgaatcggaactgac

SEQ ID NO: 2095 - DNA, 18 bp, synthetic construct
  source 1..18: mol_type = other DNA
aggtgaagtggaactgac

SEQ ID NO: 2096 - DNA, 18 bp, synthetic construct
  source 1..18: mol_type = other DNA
aggtgaagcggaactaac

SEQ ID NO: 2097 - DNA, 18 bp, synthetic construct
  source 1..18: mol_type = other DNA
gaggtgaagcggaactga

SEQ ID NO: 2098 - DNA, 18 bp, synthetic construct
  source 1..18: mol_type = other DNA
taggtgaagcggaactga

SEQ ID NO: 2099 - DNA, 18 bp, synthetic construct
  source 1..18: mol_type = other DNA
gaggtgaagtggaactga

SEQ ID NO: 2100 - DNA, 18 bp, synthetic construct
  source 1..18: mol_type = other DNA
gaggtgaagctgaactga

SEQ ID NO: 2101 - DNA, 18 bp, synthetic construct
  source 1..18: mol_type = other DNA
gaggtgaagcgtaactga

SEQ ID NO: 2102 - DNA, 18 bp, synthetic construct
  source 1..18: mol_type = other DNA
gaggtgaagcggaattga

SEQ ID NO: 2103 - DNA, 18 bp, synthetic construct
  source 1..18: mol_type = other DNA
gaggtgaagcggaactta

SEQ ID NO: 2104 - DNA, 18 bp, synthetic construct
  source 1..18: mol_type = other DNA
gatgtgaagcggaactga

SEQ ID NO: 2105 - DNA, 18 bp, synthetic construct
  source 1..18: mol_type = other DNA
gagttgaagcggaactga

SEQ ID NO: 2106 - DNA, 18 bp, synthetic construct
  source 1..18: mol_type = other DNA
gaggttaagcggaactga

SEQ ID NO: 2107 - DNA, 18 bp, synthetic construct
  source 1..18: mol_type = other DNA
gaggtgaatcggaactga

SEQ ID NO: 2108 - DNA, 18 bp, synthetic construct
  source 1..18: mol_type = other DNA
gaggtgaagcggaactaa

SEQ ID NO: 2109 - DNA, 18 bp, synthetic construct
  source 1..18: mol_type = other DNA
ggaggtgaagcggaactg

SEQ ID NO: 2110 - DNA, 18 bp, synthetic construct
  source 1..18: mol_type = other DNA
tgaggtgaagcggaactg

SEQ ID NO: 2111 - DNA, 18 bp, synthetic construct
  source 1..18: mol_type = other DNA
ggaggtgaatcggaactg

SEQ ID NO: 2112 - DNA, 18 bp, synthetic construct
  source 1..18: mol_type = other DNA
ggaggtgaagtggaactg

SEQ ID NO: 2113 - DNA, 18 bp, synthetic construct
  source 1..18: mol_type = other DNA
ggaggtgaagctgaactg

SEQ ID NO: 2114 - DNA, 18 bp, synthetic construct
  source 1..18: mol_type = other DNA
ggaggtgaagcgtaactg

SEQ ID NO: 2115 - DNA, 18 bp, synthetic construct
  source 1..18: mol_type = other DNA
ggaggtgaagcggaattg

SEQ ID NO: 2116 - DNA, 18 bp, synthetic construct
  source 1..18: mol_type = other DNA
ggaggtgaagcggaactt

SEQ ID NO: 2117 - DNA, 18 bp, synthetic construct
  source 1..18: mol_type = other DNA
gtaggtgaagcggaactg

SEQ ID NO: 2118 - DNA, 18 bp, synthetic construct
  source 1..18: mol_type = other DNA
ggatgtgaagcggaactg

SEQ ID NO: 2119 - DNA, 18 bp, synthetic construct
  source 1..18: mol_type = other DNA
ggagttgaagcggaactg

SEQ ID NO: 2120 - DNA, 18 bp, synthetic construct
  source 1..18: mol_type = other DNA
ggaggttaagcggaactg

SEQ ID NO: 2121 - DNA, 18 bp, synthetic construct
  source 1..18: mol_type = other DNA
ggaggtgaagcggaacta

SEQ ID NO: 2122 - DNA, 18 bp, synthetic construct
  source 1..18: mol_type = other DNA
aggaggtgaagcggaact

SEQ ID NO: 2123 - DNA, 18 bp, synthetic construct
  source 1..18: mol_type = other DNA
aggaggtgaatcggaact

SEQ ID NO: 2124 - DNA, 18 bp, synthetic construct
  source 1..18: mol_type = other DNA
aggaggtgaagtggaact

SEQ ID NO: 2125 - DNA, 18 bp, synthetic construct
  source 1..18: mol_type = other DNA
aggaggtgaagctgaact

SEQ ID NO: 2126 - DNA, 18 bp, synthetic construct
  source 1..18: mol_type = other DNA
aggaggtgaagcgtaact

SEQ ID NO: 2127 - DNA, 18 bp, synthetic construct
  source 1..18: mol_type = other DNA
aggaggtgaagcggaatt

SEQ ID NO: 2128 - DNA, 18 bp, synthetic construct
  source 1..18: mol_type = other DNA
atgaggtgaagcggaact

SEQ ID NO: 2129 - DNA, 18 bp, synthetic construct
  source 1..18: mol_type = other DNA
agtaggtgaagcggaact

SEQ ID NO: 2130 - DNA, 18 bp, synthetic construct
  source 1..18: mol_type = other DNA
aggatgtgaagcggaact

SEQ ID NO: 2131 - DNA, 18 bp, synthetic construct
  source 1..18: mol_type = other DNA
aggagttgaagcggaact

SEQ ID NO: 2132 - DNA, 18 bp, synthetic construct
  source 1..18: mol_type = other DNA
aggaggttaagcggaact

SEQ ID NO: 2133 - DNA, 18 bp, synthetic construct
  source 1..18: mol_type = other DNA
aggaggtgaagcgaaact

SEQ ID NO: 2134 - DNA, 18 bp, synthetic construct
  source 1..18: mol_type = other DNA
aaggaggtgaagcggaac

SEQ ID NO: 2135 - DNA, 18 bp, synthetic construct
  source 1..18: mol_type = other DNA
aaggaggtgaatcggaac

SEQ ID NO: 2136 - DNA, 18 bp, synthetic construct
  source 1..18: mol_type = other DNA
aaggaggtgaagtggaac

SEQ ID NO: 2137 - DNA, 18 bp, synthetic construct
  source 1..18: mol_type = other DNA
aaggaggtgaagctgaac

SEQ ID NO: 2138 - DNA, 18 bp, synthetic construct
  source 1..18: mol_type = other DNA
aaggaggtgaagcgtaac

SEQ ID NO: 2139 - DNA, 18 bp, synthetic construct
  source 1..18: mol_type = other DNA
aaggaggtgaagcggaat

SEQ ID NO: 2140 - DNA, 18 bp, synthetic construct
  source 1..18: mol_type = other DNA
aatgaggtgaagcggaac

SEQ ID NO: 2141 - DNA, 18 bp, synthetic construct
  source 1..18: mol_type = other DNA
aagtaggtgaagcggaac

SEQ ID NO: 2142 - DNA, 18 bp, synthetic construct
  source 1..18: mol_type = other DNA
aaggatgtgaagcggaac

SEQ ID NO: 2143 - DNA, 18 bp, synthetic construct
  source 1..18: mol_type = other DNA
aaggagttgaagcggaac

SEQ ID NO: 2144 - DNA, 18 bp, synthetic construct
  source 1..18: mol_type = other DNA
aaggaggttaagcggaac

SEQ ID NO: 2145 - DNA, 18 bp, synthetic construct
  source 1..18: mol_type = other DNA
aaggaggtgaagcgaaac

SEQ ID NO: 2146 - DNA, 18 bp, synthetic construct
  source 1..18: mol_type = other DNA
aaaggaggtgaagcggaa

SEQ ID NO: 2147 - DNA, 18 bp, synthetic construct
  source 1..18: mol_type = other DNA
aaaggaggttaagcggaa

SEQ ID NO: 2148 - DNA, 18 bp, synthetic construct
  source 1..18: mol_type = other DNA
aaaggaggtgaatcggaa

SEQ ID NO: 2149 - DNA, 18 bp, synthetic construct
  source 1..18: mol_type = other DNA
aaaggaggtgaagtggaa

SEQ ID NO: 2150 - DNA, 18 bp, synthetic construct
  source 1..18: mol_type = other DNA
aaaggaggtgaagctgaa

SEQ ID NO: 2151 - DNA, 18 bp, synthetic construct
  source 1..18: mol_type = other DNA
aaaggaggtgaagcgtaa

SEQ ID NO: 2152 - DNA, 18 bp, synthetic construct
  source 1..18: mol_type = other DNA
aaatgaggtgaagcggaa

SEQ ID NO: 2153 - DNA, 18 bp, synthetic construct
  source 1..18: mol_type = other DNA
aaagtaggtgaagcggaa

SEQ ID NO: 2154 - DNA, 18 bp, synthetic construct
  source 1..18: mol_type = other DNA
aaaggatgtgaagcggaa

SEQ ID NO: 2155 - DNA, 18 bp, synthetic construct
  source 1..18: mol_type = other DNA
aaaggagttgaagcggaa

SEQ ID NO: 2156 - DNA, 18 bp, synthetic construct
  source 1..18: mol_type = other DNA
aaaggaggtgaagcgaaa

SEQ ID NO: 2157 - DNA, 18 bp, synthetic construct
  source 1..18: mol_type = other DNA
aaaaggaggtgaagcgga

SEQ ID NO: 2158 - DNA, 18 bp, synthetic construct
  source 1..18: mol_type = other DNA
aaaaggaggttaagcgga

SEQ ID NO: 2159 - DNA, 18 bp, synthetic construct
  source 1..18: mol_type = other DNA
aaaaggaggtgaatcgga

SEQ ID NO: 2160 - DNA, 18 bp, synthetic construct
  source 1..18: mol_type = other DNA
aaaaggaggtgaagtgga

SEQ ID NO: 2161 - DNA, 18 bp, synthetic construct
  source 1..18: mol_type = other DNA
aaaaggaggtgaagctga

SEQ ID NO: 2162 - DNA, 18 bp, synthetic construct
  source 1..18: mol_type = other DNA
aaaaggaggtgaagcgta

SEQ ID NO: 2163 - DNA, 18 bp, synthetic construct
  source 1..18: mol_type = other DNA
aaaatgaggtgaagcgga

SEQ ID NO: 2164 - DNA, 18 bp, synthetic construct
  source 1..18: mol_type = other DNA
aaaagtaggtgaagcgga

SEQ ID NO: 2165 - DNA, 18 bp, synthetic construct
  source 1..18: mol_type = other DNA
aaaaggatgtgaagcgga

SEQ ID NO: 2166 - DNA, 18 bp, synthetic construct
  source 1..18: mol_type = other DNA
aaaaggagttgaagcgga

SEQ ID NO: 2167 - DNA, 18 bp, synthetic construct
  source 1..18: mol_type = other DNA
aaaaggaggtgaagcgaa

SEQ ID NO: 2168 - DNA, 18 bp, synthetic construct
  source 1..18: mol_type = other DNA
caaaaggaggtgaagcgg

SEQ ID NO: 2169 - DNA, 18 bp, synthetic construct
  source 1..18: mol_type = other DNA
taaaaggaggtgaagcgg

SEQ ID NO: 2170 - DNA, 18 bp, synthetic construct
  source 1..18: mol_type = other DNA
caaaaggagttgaagcgg

SEQ ID NO: 2171 - DNA, 18 bp, synthetic construct
  source 1..18: mol_type = other DNA
caaaaggaggttaagcgg

SEQ ID NO: 2172 - DNA, 18 bp, synthetic construct
  source 1..18: mol_type = other DNA
caaaaggaggtgaatcgg

SEQ ID NO: 2173 - DNA, 18 bp, synthetic construct
  source 1..18: mol_type = other DNA
caaaaggaggtgaagtgg

SEQ ID NO: 2174 - DNA, 18 bp, synthetic construct
  source 1..18: mol_type = other DNA
caaaaggaggtgaagctg

SEQ ID NO: 2175 - DNA, 18 bp, synthetic construct
  source 1..18: mol_type = other DNA
caaaaggaggtgaagcgt

SEQ ID NO: 2176 - DNA, 18 bp, synthetic construct
  source 1..18: mol_type = other DNA
caaaatgaggtgaagcgg

SEQ ID NO: 2177 - DNA, 18 bp, synthetic construct
  source 1..18: mol_type = other DNA
caaaagtaggtgaagcgg

SEQ ID NO: 2178 - DNA, 18 bp, synthetic construct
  source 1..18: mol_type = other DNA
caaaaggatgtgaagcgg

SEQ ID NO: 2179 - DNA, 18 bp, synthetic construct
  source 1..18: mol_type = other DNA
caaaaggaggtgaagcga

SEQ ID NO: 2180 - DNA, 18 bp, synthetic construct
  source 1..18: mol_type = other DNA
acaaaaggaggtgaagcg

SEQ ID NO: 2181 - DNA, 18 bp, synthetic construct
  source 1..18: mol_type = other DNA
acaaaaggatgtgaagcg

SEQ ID NO: 2182 - DNA, 18 bp, synthetic construct
  source 1..18: mol_type = other DNA
acaaaaggagttgaagcg

SEQ ID NO: 2183 - DNA, 18 bp, synthetic construct
  source 1..18: mol_type = other DNA
acaaaaggaggttaagcg

SEQ ID NO: 2184 - DNA, 18 bp, synthetic construct
  source 1..18: mol_type = other DNA
acaaaaggaggtgaatcg

SEQ ID NO: 2185 - DNA, 18 bp, synthetic construct
  source 1..18: mol_type = other DNA
acaaaaggaggtgaagtg

SEQ ID NO: 2186 - DNA, 18 bp, synthetic construct
  source 1..18: mol_type = other DNA
acaaaaggaggtgaagct

SEQ ID NO: 2187 - DNA, 18 bp, synthetic construct
  source 1..18: mol_type = other DNA
ataaaaggaggtgaagcg

SEQ ID NO: 2188 - DNA, 18 bp, synthetic construct
  source 1..18: mol_type = other DNA
acaaaatgaggtgaagcg

SEQ ID NO: 2189 - DNA, 18 bp, synthetic construct
  source 1..18: mol_type = other DNA
acaaaagtaggtgaagcg

SEQ ID NO: 2190 - DNA, 18 bp, synthetic construct
  source 1..18: mol_type = other DNA
acaaaaggaggtgaagca

SEQ ID NO: 2191 - DNA, 18 bp, synthetic construct
  source 1..18: mol_type = other DNA
tacaaaaggaggtgaagc

SEQ ID NO: 2192 - DNA, 18 bp, synthetic construct
  source 1..18: mol_type = other DNA
tacaaaaggatgtgaagc

SEQ ID NO: 2193 - DNA, 18 bp, synthetic construct
  source 1..18: mol_type = other DNA
tacaaaaggagttgaagc

SEQ ID NO: 2194 - DNA, 18 bp, synthetic construct
  source 1..18: mol_type = other DNA
tacaaaaggaggttaagc

SEQ ID NO: 2195 - DNA, 18 bp, synthetic construct
  source 1..18: mol_type = other DNA
tacaaaaggaggtgaatc

SEQ ID NO: 2196 - DNA, 18 bp, synthetic construct
  source 1..18: mol_type = other DNA
tacaaaaggaggtgaagt

SEQ ID NO: 2197 - DNA, 18 bp, synthetic construct
  source 1..18: mol_type = other DNA
tataaaaggaggtgaagc

SEQ ID NO: 2198 - DNA, 18 bp, synthetic construct
  source 1..18: mol_type = other DNA
tacaaaatgaggtgaagc

SEQ ID NO: 2199 - DNA, 18 bp, synthetic construct
  source 1..18: mol_type = other DNA
tacaaaagtaggtgaagc

SEQ ID NO: 2200 - DNA, 18 bp, synthetic construct
  source 1..18: mol_type = other DNA
tacaaaaggaggtgaaac

SEQ ID NO: 2201 - DNA, 18 bp, synthetic construct
  source 1..18: mol_type = other DNA
atacaaaaggaggtgaag

SEQ ID NO: 2202 - DNA, 18 bp, synthetic construct
  source 1..18: mol_type = other DNA
atacaaaagtaggtgaag

SEQ ID NO: 2203 - DNA, 18 bp, synthetic construct
  source 1..18: mol_type = other DNA
atacaaaaggatgtgaag

SEQ ID NO: 2204 - DNA, 18 bp, synthetic construct
  source 1..18: mol_type = other DNA
atacaaaaggagttgaag

SEQ ID NO: 2205 - DNA, 18 bp, synthetic construct
  source 1..18: mol_type = other DNA
atacaaaaggaggttaag

SEQ ID NO: 2206 - DNA, 18 bp, synthetic construct
  source 1..18: mol_type = other DNA
atacaaaaggaggtgaat

SEQ ID NO: 2207 - DNA, 18 bp, synthetic construct
  source 1..18: mol_type = other DNA
atataaaaggaggtgaag

SEQ ID NO: 2208 - DNA, 18 bp, synthetic construct
  source 1..18: mol_type = other DNA
atacaaaatgaggtgaag

SEQ ID NO: 2209 - DNA, 18 bp, synthetic construct
  source 1..18: mol_type = other DNA
atacaaaaggaggtgaaa

SEQ ID NO: 2210 - DNA, 25 bp, synthetic construct
  source 1..25: mol_type = other DNA
atgggcagctgcagtgggaccagtg

SEQ ID NO: 2211 - DNA, 25 bp, synthetic construct
  source 1..25: mol_type = other DNA
ctgggcagctacagtgggaccagtg

SEQ ID NO: 2212 - DNA, 25 bp, synthetic construct
  source 1..25: mol_type = other DNA
ctgggcagctgaagtgggaccagtg

SEQ ID NO: 2213 - DNA, 25 bp, synthetic construct
  source 1..25: mol_type = other DNA
ctgggcagctgcaatgggaccagtg

SEQ ID NO: 2214 - DNA, 25 bp, synthetic construct
  source 1..25: mol_type = other DNA
ctgggcagctgcagtaggaccagtg

SEQ ID NO: 2215 - DNA, 25 bp, synthetic construct
  source 1..25: mol_type = other DNA
ctgggcagctgcagtgagaccagtg

SEQ ID NO: 2216 - DNA, 25 bp, synthetic construct
  source 1..25: mol_type = other DNA
ctgggcagctgcagtggaaccagtg

SEQ ID NO: 2217 - DNA, 25 bp, synthetic construct
  source 1..25: mol_type = other DNA
ctgggcagctgcagtgggaacagtg

SEQ ID NO: 2218 - DNA, 25 bp, synthetic construct
  source 1..25: mol_type = other DNA
ctgggcagctgcagtgggacaagtg

SEQ ID NO: 2219 - DNA, 25 bp, synthetic construct
  source 1..25: mol_type = other DNA
ctgggcagctgcagtgggaccaatg

SEQ ID NO: 2220 - DNA, 25 bp, synthetic construct
  source 1..25: mol_type = other DNA
ctaggcagctgcagtgggaccagtg

SEQ ID NO: 2221 - DNA, 25 bp, synthetic construct
  source 1..25: mol_type = other DNA
ctgagcagctgcagtgggaccagtg

SEQ ID NO: 2222 - DNA, 25 bp, synthetic construct
  source 1..25: mol_type = other DNA
ctggacagctgcagtgggaccagtg

SEQ ID NO: 2223 - DNA, 25 bp, synthetic construct
  source 1..25: mol_type = other DNA
ctgggaagctgcagtgggaccagtg

SEQ ID NO: 2224 - DNA, 25 bp, synthetic construct
  source 1..25: mol_type = other DNA
ctgggcaactgcagtgggaccagtg

SEQ ID NO: 2225 - DNA, 25 bp, synthetic construct
  source 1..25: mol_type = other DNA
ctgggcagatgcagtgggaccagtg

SEQ ID NO: 2226 - DNA, 25 bp, synthetic construct
  source 1..25: mol_type = other DNA
ctgggcagctacaatgggaccagtg

SEQ ID NO: 2227 - DNA, 25 bp, synthetic construct
  source 1..25: mol_type = other DNA
ctgggcagctacagtaggaccagtg

SEQ ID NO: 2228 - DNA, 25 bp, synthetic construct
  source 1..25: mol_type = other DNA
ctgggcagctacagtgagaccagtg

SEQ ID NO: 2229 - DNA, 25 bp, synthetic construct
  source 1..25: mol_type = other DNA
ctgggcagctacagtggaaccagtg

SEQ ID NO: 2230 - DNA, 25 bp, synthetic construct
  source 1..25: mol_type = other DNA
ctgggcagctacagtgggaccaatg

SEQ ID NO: 2231 - DNA, 25 bp, synthetic construct
  source 1..25: mol_type = other DNA
ctgggcagctacagtgggaccagta

SEQ ID NO: 2232 - DNA, 25 bp, synthetic construct
  source 1..25: mol_type = other DNA
ctgggcagctgcaataggaccagtg

SEQ ID NO: 2233 - DNA, 25 bp, synthetic construct
  source 1..25: mol_type = other DNA
ctgggcagctgcaatgagaccagtg

SEQ ID NO: 2234 - DNA, 25 bp, synthetic construct
  source 1..25: mol_type = other DNA
ctgggcagctgcaatggaaccagtg

SEQ ID NO: 2235 - DNA, 25 bp, synthetic construct
  source 1..25: mol_type = other DNA
ctgggcagctgcaatgggaccaatg

SEQ ID NO: 2236 - DNA, 25 bp, synthetic construct
  source 1..25: mol_type = other DNA
ctgggcagctgcaatgggaccagta

SEQ ID NO: 2237 - DNA, 25 bp, synthetic construct
  source 1..25: mol_type = other DNA
ctgggcagctgcagtaagaccagtg

SEQ ID NO: 2238 - DNA, 25 bp, synthetic construct
  source 1..25: mol_type = other DNA
ctgggcagctgcagtagaaccagtg

SEQ ID NO: 2239 - DNA, 25 bp, synthetic construct
  source 1..25: mol_type = other DNA
ctgggcagctgcagtaggaccaatg

SEQ ID NO: 2240 - DNA, 25 bp, synthetic construct
  source 1..25: mol_type = other DNA
ctgggcagctgcagtaggaccagta

SEQ ID NO: 2241 - DNA, 25 bp, synthetic construct
  source 1..25: mol_type = other DNA
ctgggcagctgcagtgaaaccagtg

SEQ ID NO: 2242 - DNA, 25 bp, synthetic construct
  source 1..25: mol_type = other DNA
ctgggcagctgcagtgagaccaatg

SEQ ID NO: 2243 - DNA, 25 bp, synthetic construct
  source 1..25: mol_type = other DNA
ctgggcagctgcagtgagaccagta

SEQ ID NO: 2244 - DNA, 25 bp, synthetic construct
  source 1..25: mol_type = other DNA
ctgggcagctgcagtggaaccaatg

SEQ ID NO: 2245 - DNA, 25 bp, synthetic construct
  source 1..25: mol_type = other DNA
ctgggcagctgcagtggaaccagta

SEQ ID NO: 2246 - DNA, 25 bp, synthetic construct
  source 1..25: mol_type = other DNA
ctgggcagctgcagtgggaccaata

SEQ ID NO: 2247 - DNA, 25 bp, synthetic construct
  source 1..25: mol_type = other DNA
ctaggcagctacagtgggaccagtg

SEQ ID NO: 2248 - DNA, 25 bp, synthetic construct
  source 1..25: mol_type = other DNA
ctaggcagctgcaatgggaccagtg

SEQ ID NO: 2249 - DNA, 25 bp, synthetic construct
  source 1..25: mol_type = other DNA
ctaggcagctgcagtaggaccagtg

SEQ ID NO: 2250 - DNA, 25 bp, synthetic construct
  source 1..25: mol_type = other DNA
ctaggcagctgcagtgagaccagtg

SEQ ID NO: 2251 - DNA, 25 bp, synthetic construct
  source 1..25: mol_type = other DNA
ctaggcagctgcagtggaaccagtg

SEQ ID NO: 2252 - DNA, 25 bp, synthetic construct
  source 1..25: mol_type = other DNA
ctaggcagctgcagtgggaccaatg

SEQ ID NO: 2253 - DNA, 25 bp, synthetic construct
  source 1..25: mol_type = other DNA
ctaggcagctgcagtgggaccagta

SEQ ID NO: 2254 - DNA, 25 bp, synthetic construct
  source 1..25: mol_type = other DNA
ctaagcagctgcagtgggaccagtg

SEQ ID NO: 2255 - DNA, 25 bp, synthetic construct
  source 1..25: mol_type = other DNA
ctagacagctgcagtgggaccagtg

SEQ ID NO: 2256 - DNA, 25 bp, synthetic construct
  source 1..25: mol_type = other DNA
ctaggcaactgcagtgggaccagtg

SEQ ID NO: 2257 - DNA, 25 bp, synthetic construct
  source 1..25: mol_type = other DNA
ctgagcagctacagtgggaccagtg

SEQ ID NO: 2258 - DNA, 25 bp, synthetic construct
  source 1..25: mol_type = other DNA
ctgagcagctgcaatgggaccagtg

SEQ ID NO: 2259 - DNA, 25 bp, synthetic construct
  source 1..25: mol_type = other DNA
ctgagcagctgcagtaggaccagtg

SEQ ID NO: 2260 - DNA, 25 bp, synthetic construct
  source 1..25: mol_type = other DNA
ctgagcagctgcagtgagaccagtg

SEQ ID NO: 2261 - DNA, 25 bp, synthetic construct
  source 1..25: mol_type = other DNA
ctgagcagctgcagtggaaccagtg

SEQ ID NO: 2262 - DNA, 25 bp, synthetic construct
  source 1..25: mol_type = other DNA
ctgagcagctgcagtgggaccaatg

SEQ ID NO: 2263 - DNA, 25 bp, synthetic construct
  source 1..25: mol_type = other DNA
ctgagcagctgcagtgggaccagta

SEQ ID NO: 2264 - DNA, 25 bp, synthetic construct
  source 1..25: mol_type = other DNA
ctgaacagctgcagtgggaccagtg

SEQ ID NO: 2265 - DNA, 25 bp, synthetic construct
  source 1..25: mol_type = other DNA
ctgagcaactgcagtgggaccagtg

SEQ ID NO: 2266 - DNA, 25 bp, synthetic construct
  source 1..25: mol_type = other DNA
ctggacagctacagtgggaccagtg

SEQ ID NO: 2267 - DNA, 25 bp, synthetic construct
  source 1..25: mol_type = other DNA
ctggacagctgcaatgggaccagtg

SEQ ID NO: 2268 - DNA, 25 bp, synthetic construct
  source 1..25: mol_type = other DNA
ctggacagctgcagtaggaccagtg

SEQ ID NO: 2269 - DNA, 25 bp, synthetic construct
  source 1..25: mol_type = other DNA
ctggacagctgcagtgagaccagtg

SEQ ID NO: 2270 - DNA, 25 bp, synthetic construct
  source 1..25: mol_type = other DNA
ctggacagctgcagtggaaccagtg

SEQ ID NO: 2271 - DNA, 25 bp, synthetic construct
  source 1..25: mol_type = other DNA
ctggacagctgcagtgggaccaatg

SEQ ID NO: 2272 - DNA, 25 bp, synthetic construct
  source 1..25: mol_type = other DNA
ctggacagctgcagtgggaccagta

SEQ ID NO: 2273 - DNA, 25 bp, synthetic construct
  source 1..25: mol_type = other DNA
ctggacaactgcagtgggaccagtg

SEQ ID NO: 2274 - DNA, 25 bp, synthetic construct
  source 1..25: mol_type = other DNA
ctgggcaactacagtgggaccagtg

SEQ ID NO: 2275 - DNA, 25 bp, synthetic construct
  source 1..25: mol_type = other DNA
ctgggcaactgcaatgggaccagtg

SEQ ID NO: 2276 - DNA, 25 bp, synthetic construct
  source 1..25: mol_type = other DNA
ctgggcaactgcagtaggaccagtg

SEQ ID NO: 2277 - DNA, 25 bp, synthetic construct
  source 1..25: mol_type = other DNA
ctgggcaactgcagtgagaccagtg

SEQ ID NO: 2278 - DNA, 25 bp, synthetic construct
  source 1..25: mol_type = other DNA
ctgggcaactgcagtggaaccagtg

SEQ ID NO: 2279 - DNA, 25 bp, synthetic construct
  source 1..25: mol_type = other DNA
ctgggcaactgcagtgggaccaatg

SEQ ID NO: 2280 - DNA, 25 bp, synthetic construct
  source 1..25: mol_type = other DNA
ctgggcaactgcagtgggaccagta

SEQ ID NO: 2281 - DNA, 25 bp, synthetic construct
  source 1..25: mol_type = other DNA
ctgggcagctgcagtgggaccagta

SEQ ID NO: 2282 - DNA, 25 bp, synthetic construct
  source 1..25: mol_type = other DNA
actgggcagctgcagtgggaccagt

SEQ ID NO: 2283 - DNA, 25 bp, synthetic construct
  source 1..25: mol_type = other DNA
actgggcagttgcagtgggaccagt

SEQ ID NO: 2284 - DNA, 25 bp, synthetic construct
  source 1..25: mol_type = other DNA
actgggcagcttcagtgggaccagt

SEQ ID NO: 2285 - DNA, 25 bp, synthetic construct
  source 1..25: mol_type = other DNA
actgggcagctgtagtgggaccagt

SEQ ID NO: 2286 - DNA, 25 bp, synthetic construct
  source 1..25: mol_type = other DNA
actgggcagctgcattgggaccagt

SEQ ID NO: 2287 - DNA, 25 bp, synthetic construct
  source 1..25: mol_type = other DNA
actgggcagctgcagttggaccagt

SEQ ID NO: 2288 - DNA, 25 bp, synthetic construct
  source 1..25: mol_type = other DNA
actgggcagctgcagtgtgaccagt

SEQ ID NO: 2289 - DNA, 25 bp, synthetic construct
  source 1..25: mol_type = other DNA
actgggcagctgcagtggtaccagt

SEQ ID NO: 2290 - DNA, 25 bp, synthetic construct
  source 1..25: mol_type = other DNA
attgggcagctgcagtgggaccagt

SEQ ID NO: 2291 - DNA, 25 bp, synthetic construct
  source 1..25: mol_type = other DNA
actgggcagctgcagtgggatcagt

SEQ ID NO: 2292 - DNA, 25 bp, synthetic construct
  source 1..25: mol_type = other DNA
actgggcagctgcagtgggactagt

SEQ ID NO: 2293 - DNA, 25 bp, synthetic construct
  source 1..25: mol_type = other DNA
actgggcagctgcagtgggaccatt

SEQ ID NO: 2294 - DNA, 25 bp, synthetic construct
  source 1..25: mol_type = other DNA
acttggcagctgcagtgggaccagt

SEQ ID NO: 2295 - DNA, 25 bp, synthetic construct
  source 1..25: mol_type = other DNA
actgtgcagctgcagtgggaccagt

SEQ ID NO: 2296 - DNA, 25 bp, synthetic construct
  source 1..25: mol_type = other DNA
actggtcagctgcagtgggaccagt

SEQ ID NO: 2297 - DNA, 25 bp, synthetic construct
  source 1..25: mol_type = other DNA
actgggtagctgcagtgggaccagt

SEQ ID NO: 2298 - DNA, 25 bp, synthetic construct
  source 1..25: mol_type = other DNA
actgggcatctgcagtgggaccagt

SEQ ID NO: 2299 - DNA, 25 bp, synthetic construct
  source 1..25: mol_type = other DNA
actgggcagctacaatgggaccagt

SEQ ID NO: 2300 - DNA, 25 bp, synthetic construct
  source 1..25: mol_type = other DNA
actgggcagctacagtaggaccagt

SEQ ID NO: 2301 - DNA, 25 bp, synthetic construct
  source 1..25: mol_type = other DNA
actgggcagctacagtgagaccagt

SEQ ID NO: 2302 - DNA, 25 bp, synthetic construct
  source 1..25: mol_type = other DNA
actgggcagctacagtggaaccagt

SEQ ID NO: 2303 - DNA, 25 bp, synthetic construct
  source 1..25: mol_type = other DNA
actgggcagctacagtgggaccaat

SEQ ID NO: 2304 - DNA, 25 bp, synthetic construct
  source 1..25: mol_type = other DNA
actgggcagctgcaataggaccagt

SEQ ID NO: 2305 - DNA, 25 bp, synthetic construct
  source 1..25: mol_type = other DNA
actgggcagctgcaatgagaccagt

SEQ ID NO: 2306 - DNA, 25 bp, synthetic construct
  source 1..25: mol_type = other DNA
actgggcagctgcaatggaaccagt

SEQ ID NO: 2307 - DNA, 25 bp, synthetic construct
  source 1..25: mol_type = other DNA
actgggcagctgcaatgggaccaat

SEQ ID NO: 2308 - DNA, 25 bp, synthetic construct
  source 1..25: mol_type = other DNA
actgggcagctgcagtaagaccagt

SEQ ID NO: 2309 - DNA, 25 bp, synthetic construct
  source 1..25: mol_type = other DNA
actgggcagctgcagtagaaccagt

SEQ ID NO: 2310 - DNA, 25 bp, synthetic construct
  source 1..25: mol_type = other DNA
actgggcagctgcagtaggaccaat

SEQ ID NO: 2311 - DNA, 25 bp, synthetic construct
  source 1..25: mol_type = other DNA
actgggcagctgcagtgaaaccagt

SEQ ID NO: 2312 - DNA, 25 bp, synthetic construct
  source 1..25: mol_type = other DNA
actgggcagctgcagtgagaccaat

SEQ ID NO: 2313 - DNA, 25 bp, synthetic construct
  source 1..25: mol_type = other DNA
actgggcagctgcagtggaaccaat

SEQ ID NO: 2314 - DNA, 25 bp, synthetic construct
  source 1..25: mol_type = other DNA
actaggcagctacagtgggaccagt

SEQ ID NO: 2315 - DNA, 25 bp, synthetic construct
  source 1..25: mol_type = other DNA
actaggcagctgcaatgggaccagt

SEQ ID NO: 2316 - DNA, 25 bp, synthetic construct
  source 1..25: mol_type = other DNA
actaggcagctgcagtaggaccagt

SEQ ID NO: 2317 - DNA, 25 bp, synthetic construct
  source 1..25: mol_type = other DNA
actaggcagctgcagtgagaccagt

SEQ ID NO: 2318 - DNA, 25 bp, synthetic construct
  source 1..25: mol_type = other DNA
actaggcagctgcagtggaaccagt

SEQ ID NO: 2319 - DNA, 25 bp, synthetic construct
  source 1..25: mol_type = other DNA
actaggcagctgcagtgggaccaat

SEQ ID NO: 2320 - DNA, 25 bp, synthetic construct
  source 1..25: mol_type = other DNA
actaagcagctgcagtgggaccagt

SEQ ID NO: 2321 - DNA, 25 bp, synthetic construct
  source 1..25: mol_type = other DNA
actagacagctgcagtgggaccagt

SEQ ID NO: 2322 - DNA, 25 bp, synthetic construct
  source 1..25: mol_type = other DNA
actaggcaactgcagtgggaccagt

SEQ ID NO: 2323 - DNA, 25 bp, synthetic construct
  source 1..25: mol_type = other DNA
actgagcagctacagtgggaccagt

SEQ ID NO: 2324 - DNA, 25 bp, synthetic construct
  source 1..25: mol_type = other DNA
actgagcagctgcaatgggaccagt

SEQ ID NO: 2325 - DNA, 25 bp, synthetic construct
  source 1..25: mol_type = other DNA
actgagcagctgcagtaggaccagt

SEQ ID NO: 2326 - DNA, 25 bp, synthetic construct
  source 1..25: mol_type = other DNA
actgagcagctgcagtgagaccagt

SEQ ID NO: 2327 - DNA, 25 bp, synthetic construct
  source 1..25: mol_type = other DNA
actgagcagctgcagtggaaccagt

SEQ ID NO: 2328 - DNA, 25 bp, synthetic construct
  source 1..25: mol_type = other DNA
actgagcagctgcagtgggaccaat

SEQ ID NO: 2329 - DNA, 25 bp, synthetic construct
  source 1..25: mol_type = other DNA
actgaacagctgcagtgggaccagt

SEQ ID NO: 2330 - DNA, 25 bp, synthetic construct
  source 1..25: mol_type = other DNA
actgagcaactgcagtgggaccagt

SEQ ID NO: 2331 - DNA, 25 bp, synthetic construct
  source 1..25: mol_type = other DNA
actggacagctacagtgggaccagt

SEQ ID NO: 2332 - DNA, 25 bp, synthetic construct
  source 1..25: mol_type = other DNA
actggacagctgcaatgggaccagt

SEQ ID NO: 2333 - DNA, 25 bp, synthetic construct
  source 1..25: mol_type = other DNA
actggacagctgcagtaggaccagt

SEQ ID NO: 2334 - DNA, 25 bp, synthetic construct
  source 1..25: mol_type = other DNA
actggacagctgcagtgagaccagt

SEQ ID NO: 2335 - DNA, 25 bp, synthetic construct
  source 1..25: mol_type = other DNA
actggacagctgcagtggaaccagt

SEQ ID NO: 2336 - DNA, 25 bp, synthetic construct
  source 1..25: mol_type = other DNA
actggacagctgcagtgggaccaat

SEQ ID NO: 2337 - DNA, 25 bp, synthetic construct
  source 1..25: mol_type = other DNA
actggacaactgcagtgggaccagt

SEQ ID NO: 2338 - DNA, 25 bp, synthetic construct
  source 1..25: mol_type = other DNA
actgggcaactacagtgggaccagt

SEQ ID NO: 2339 - DNA, 25 bp, synthetic construct
  source 1..25: mol_type = other DNA
actgggcaactgcaatgggaccagt

SEQ ID NO: 2340 - DNA, 25 bp, synthetic construct
  source 1..25: mol_type = other DNA
actgggcaactgcagtaggaccagt

SEQ ID NO: 2341 - DNA, 25 bp, synthetic construct
  source 1..25: mol_type = other DNA
actgggcaactgcagtgagaccagt

SEQ ID NO: 2342 - DNA, 25 bp, synthetic construct
  source 1..25: mol_type = other DNA
actgggcaactgcagtggaaccagt

SEQ ID NO: 2343 - DNA, 25 bp, synthetic construct
  source 1..25: mol_type = other DNA
actgggcaactgcagtgggaccaat

SEQ ID NO: 2344 - DNA, 25 bp, synthetic construct
  source 1..25: mol_type = other DNA
actgggcagctgcagtgggaccaat

SEQ ID NO: 2345 - DNA, 25 bp, synthetic construct
  source 1..25: mol_type = other DNA
gactgggcagctgcagtgggaccag

SEQ ID NO: 2346 - DNA, 25 bp, synthetic construct
  source 1..25: mol_type = other DNA
tactgggcagctgcagtgggaccag

SEQ ID NO: 2347 - DNA, 25 bp, synthetic construct
  source 1..25: mol_type = other DNA
gactgggcatctgcagtgggaccag

SEQ ID NO: 2348 - DNA, 25 bp, synthetic construct
  source 1..25: mol_type = other DNA
gactgggcagttgcagtgggaccag

SEQ ID NO: 2349 - DNA, 25 bp, synthetic construct
  source 1..25: mol_type = other DNA
gactgggcagcttcagtgggaccag

SEQ ID NO: 2350 - DNA, 25 bp, synthetic construct
  source 1..25: mol_type = other DNA
gactgggcagctgtagtgggaccag

SEQ ID NO: 2351 - DNA, 25 bp, synthetic construct
  source 1..25: mol_type = other DNA
gactgggcagctgcattgggaccag

SEQ ID NO: 2352 - DNA, 25 bp, synthetic construct
  source 1..25: mol_type = other DNA
gactgggcagctgcagttggaccag

SEQ ID NO: 2353 - DNA, 25 bp, synthetic construct
  source 1..25: mol_type = other DNA
gactgggcagctgcagtgtgaccag

SEQ ID NO: 2354 - DNA, 25 bp, synthetic construct
  source 1..25: mol_type = other DNA
gactgggcagctgcagtggtaccag

SEQ ID NO: 2355 - DNA, 25 bp, synthetic construct
  source 1..25: mol_type = other DNA
gactgggcagctgcagtgggatcag

SEQ ID NO: 2356 - DNA, 25 bp, synthetic construct
  source 1..25: mol_type = other DNA
gactgggcagctgcagtgggactag

SEQ ID NO: 2357 - DNA, 25 bp, synthetic construct
  source 1..25: mol_type = other DNA
gattgggcagctgcagtgggaccag

SEQ ID NO: 2358 - DNA, 25 bp, synthetic construct
  source 1..25: mol_type = other DNA
gacttggcagctgcagtgggaccag

SEQ ID NO: 2359 - DNA, 25 bp, synthetic construct
  source 1..25: mol_type = other DNA
gactgtgcagctgcagtgggaccag

SEQ ID NO: 2360 - DNA, 25 bp, synthetic construct
  source 1..25: mol_type = other DNA
gactggtcagctgcagtgggaccag

SEQ ID NO: 2361 - DNA, 25 bp, synthetic construct
  source 1..25: mol_type = other DNA
gactgggtagctgcagtgggaccag

SEQ ID NO: 2362 - DNA, 25 bp, synthetic construct
  source 1..25: mol_type = other DNA
aactgggcaactgcagtgggaccag

SEQ ID NO: 2363 - DNA, 25 bp, synthetic construct
  source 1..25: mol_type = other DNA
aactgggcagctacagtgggaccag

SEQ ID NO: 2364 - DNA, 25 bp, synthetic construct
  source 1..25: mol_type = other DNA
aactgggcagctgcaatgggaccag

SEQ ID NO: 2365 - DNA, 25 bp, synthetic construct
  source 1..25: mol_type = other DNA
aactgggcagctgcagtaggaccag

SEQ ID NO: 2366 - DNA, 25 bp, synthetic construct
  source 1..25: mol_type = other DNA
aactgggcagctgcagtgagaccag

SEQ ID NO: 2367 - DNA, 25 bp, synthetic construct
  source 1..25: mol_type = other DNA
aactgggcagctgcagtggaaccag

SEQ ID NO: 2368 - DNA, 25 bp, synthetic construct
  source 1..25: mol_type = other DNA
aactgggcagctgcagtgggaccaa

SEQ ID NO: 2369 - DNA, 25 bp, synthetic construct
  source 1..25: mol_type = other DNA
aactaggcagctgcagtgggaccag

SEQ ID NO: 2370 - DNA, 25 bp, synthetic construct
  source 1..25: mol_type = other DNA
aactgagcagctgcagtgggaccag

SEQ ID NO: 2371 - DNA, 25 bp, synthetic construct
  source 1..25: mol_type = other DNA
aactggacagctgcagtgggaccag

SEQ ID NO: 2372 - DNA, 25 bp, synthetic construct
  source 1..25: mol_type = other DNA
gactgggcaactacagtgggaccag

SEQ ID NO: 2373 - DNA, 25 bp, synthetic construct
  source 1..25: mol_type = other DNA
gactgggcaactgcaatgggaccag

SEQ ID NO: 2374 - DNA, 25 bp, synthetic construct
  source 1..25: mol_type = other DNA
gactgggcaactgcagtaggaccag

SEQ ID NO: 2375 - DNA, 25 bp, synthetic construct
  source 1..25: mol_type = other DNA
gactgggcaactgcagtgagaccag

SEQ ID NO: 2376 - DNA, 25 bp, synthetic construct
  source 1..25: mol_type = other DNA
gactgggcaactgcagtggaaccag

SEQ ID NO: 2377 - DNA, 25 bp, synthetic construct
  source 1..25: mol_type = other DNA
gactgggcaactgcagtgggaccaa

SEQ ID NO: 2378 - DNA, 25 bp, synthetic construct
  source 1..25: mol_type = other DNA
gactgggcagctacaatgggaccag

SEQ ID NO: 2379 - DNA, 25 bp, synthetic construct
  source 1..25: mol_type = other DNA
gactgggcagctacagtaggaccag

SEQ ID NO: 2380 - DNA, 25 bp, synthetic construct
  source 1..25: mol_type = other DNA
gactgggcagctacagtgagaccag

SEQ ID NO: 2381 - DNA, 25 bp, synthetic construct
  source 1..25: mol_type = other DNA
gactgggcagctacagtggaaccag

SEQ ID NO: 2382 - DNA, 25 bp, synthetic construct
  source 1..25: mol_type = other DNA
gactgggcagctacagtgggaccaa

SEQ ID NO: 2383 - DNA, 25 bp, synthetic construct
  source 1..25: mol_type = other DNA
gactgggcagctgcaataggaccag

SEQ ID NO: 2384 - DNA, 25 bp, synthetic construct
  source 1..25: mol_type = other DNA
gactgggcagctgcaatgagaccag

SEQ ID NO: 2385 - DNA, 25 bp, synthetic construct
  source 1..25: mol_type = other DNA
gactgggcagctgcaatggaaccag

SEQ ID NO: 2386 - DNA, 25 bp, synthetic construct
  source 1..25: mol_type = other DNA
gactgggcagctgcaatgggaccaa

SEQ ID NO: 2387 - DNA, 25 bp, synthetic construct
  source 1..25: mol_type = other DNA
gactgggcagctgcagtaagaccag

SEQ ID NO: 2388 - DNA, 25 bp, synthetic construct
  source 1..25: mol_type = other DNA
gactgggcagctgcagtagaaccag

SEQ ID NO: 2389 - DNA, 25 bp, synthetic construct
  source 1..25: mol_type = other DNA
gactgggcagctgcagtaggaccaa

SEQ ID NO: 2390 - DNA, 25 bp, synthetic construct
  source 1..25: mol_type = other DNA
gactgggcagctgcagtgaaaccag

SEQ ID NO: 2391 - DNA, 25 bp, synthetic construct
  source 1..25: mol_type = other DNA
gactgggcagctgcagtgagaccaa

SEQ ID NO: 2392 - DNA, 25 bp, synthetic construct
  source 1..25: mol_type = other DNA
gactgggcagctgcagtggaaccaa

SEQ ID NO: 2393 - DNA, 25 bp, synthetic construct
  source 1..25: mol_type = other DNA
gactaggcaactgcagtgggaccag

SEQ ID NO: 2394 - DNA, 25 bp, synthetic construct
  source 1..25: mol_type = other DNA
gactaggcagctacagtgggaccag

SEQ ID NO: 2395 - DNA, 25 bp, synthetic construct
  source 1..25: mol_type = other DNA
gactaggcagctgcaatgggaccag

SEQ ID NO: 2396 - DNA, 25 bp, synthetic construct
  source 1..25: mol_type = other DNA
gactaggcagctgcagtaggaccag

SEQ ID NO: 2397 - DNA, 25 bp, synthetic construct
  source 1..25: mol_type = other DNA
gactaggcagctgcagtgagaccag

SEQ ID NO: 2398 - DNA, 25 bp, synthetic construct
  source 1..25: mol_type = other DNA
gactaggcagctgcagtggaaccag

SEQ ID NO: 2399 - DNA, 25 bp, synthetic construct
  source 1..25: mol_type = other DNA
gactaggcagctgcagtgggaccaa

SEQ ID NO: 2400 - DNA, 25 bp, synthetic construct
  source 1..25: mol_type = other DNA
gactaagcagctgcagtgggaccag

SEQ ID NO: 2401 - DNA, 25 bp, synthetic construct
  source 1..25: mol_type = other DNA
gactagacagctgcagtgggaccag

SEQ ID NO: 2402 - DNA, 25 bp, synthetic construct
  source 1..25: mol_type = other DNA
gactgagcaactgcagtgggaccag

SEQ ID NO: 2403 - DNA, 25 bp, synthetic construct
  source 1..25: mol_type = other DNA
gactgagcagctacagtgggaccag

SEQ ID NO: 2404 - DNA, 25 bp, synthetic construct
  source 1..25: mol_type = other DNA
gactgagcagctgcaatgggaccag

SEQ ID NO: 2405 - DNA, 25 bp, synthetic construct
  source 1..25: mol_type = other DNA
gactgagcagctgcagtaggaccag

SEQ ID NO: 2406 - DNA, 25 bp, synthetic construct
  source 1..25: mol_type = other DNA
gactgagcagctgcagtgagaccag

SEQ ID NO: 2407 - DNA, 25 bp, synthetic construct
  source 1..25: mol_type = other DNA
gactgagcagctgcagtggaaccag

SEQ ID NO: 2408 - DNA, 25 bp, synthetic construct
  source 1..25: mol_type = other DNA
gactgagcagctgcagtgggaccaa

SEQ ID NO: 2409 - DNA, 25 bp, synthetic construct
  source 1..25: mol_type = other DNA
gactgaacagctgcagtgggaccag

SEQ ID NO: 2410 - DNA, 25 bp, synthetic construct
  source 1..25: mol_type = other DNA
gactggacaactgcagtgggaccag

SEQ ID NO: 2411 - DNA, 25 bp, synthetic construct
  source 1..25: mol_type = other DNA
gactggacagctacagtgggaccag

SEQ ID NO: 2412 - DNA, 25 bp, synthetic construct
  source 1..25: mol_type = other DNA
gactggacagctgcaatgggaccag

SEQ ID NO: 2413 - DNA, 25 bp, synthetic construct
  source 1..25: mol_type = other DNA
gactggacagctgcagtaggaccag

SEQ ID NO: 2414 - DNA, 25 bp, synthetic construct
  source 1..25: mol_type = other DNA
gactggacagctgcagtgagaccag

SEQ ID NO: 2415 - DNA, 25 bp, synthetic construct
  source 1..25: mol_type = other DNA
gactggacagctgcagtggaaccag

SEQ ID NO: 2416 - DNA, 25 bp, synthetic construct
  source 1..25: mol_type = other DNA
gactggacagctgcagtgggaccaa

SEQ ID NO: 2417 - DNA, 25 bp, synthetic construct
  source 1..25: mol_type = other DNA
gactgggcagctgcagtgggaccaa

SEQ ID NO: 2418 - DNA, 25 bp, synthetic construct
  source 1..25: mol_type = other DNA
agactgggcatctgcagtgggacca

SEQ ID NO: 2419 - DNA, 25 bp, synthetic construct
  source 1..25: mol_type = other DNA
agactgggcagttgcagtgggacca

SEQ ID NO: 2420 - DNA, 25 bp, synthetic construct
  source 1..25: mol_type = other DNA
agactgggcagcttcagtgggacca

SEQ ID NO: 2421 - DNA, 25 bp, synthetic construct
  source 1..25: mol_type = other DNA
agactgggcagctgtagtgggacca

SEQ ID NO: 2422 - DNA, 25 bp, synthetic construct
  source 1..25: mol_type = other DNA
agactgggcagctgcattgggacca

SEQ ID NO: 2423 - DNA, 25 bp, synthetic construct
  source 1..25: mol_type = other DNA
agactgggcagctgcagttggacca

SEQ ID NO: 2424 - DNA, 25 bp, synthetic construct
  source 1..25: mol_type = other DNA
atactgggcagctgcagtgggacca

SEQ ID NO: 2425 - DNA, 25 bp, synthetic construct
  source 1..25: mol_type = other DNA
agactgggcagctgcagtgtgacca

SEQ ID NO: 2426 - DNA, 25 bp, synthetic construct
  source 1..25: mol_type = other DNA
agactgggcagctgcagtggtacca

SEQ ID NO: 2427 - DNA, 25 bp, synthetic construct
  source 1..25: mol_type = other DNA
agactgggcagctgcagtgggatca

SEQ ID NO: 2428 - DNA, 25 bp, synthetic construct
  source 1..25: mol_type = other DNA
agactgggcagctgcagtgggacta

SEQ ID NO: 2429 - DNA, 25 bp, synthetic construct
  source 1..25: mol_type = other DNA
agattgggcagctgcagtgggacca

SEQ ID NO: 2430 - DNA, 25 bp, synthetic construct
  source 1..25: mol_type = other DNA
agacttggcagctgcagtgggacca

SEQ ID NO: 2431 - DNA, 25 bp, synthetic construct
  source 1..25: mol_type = other DNA
agactgtgcagctgcagtgggacca

SEQ ID NO: 2432 - DNA, 25 bp, synthetic construct
  source 1..25: mol_type = other DNA
agactggtcagctgcagtgggacca

SEQ ID NO: 2433 - DNA, 25 bp, synthetic construct
  source 1..25: mol_type = other DNA
agactgggtagctgcagtgggacca

SEQ ID NO: 2434 - DNA, 25 bp, synthetic construct
  source 1..25: mol_type = other DNA
agactgggcaactacagtgggacca

SEQ ID NO: 2435 - DNA, 25 bp, synthetic construct
  source 1..25: mol_type = other DNA
agactgggcaactgcaatgggacca

SEQ ID NO: 2436 - DNA, 25 bp, synthetic construct
  source 1..25: mol_type = other DNA
agactgggcaactgcagtaggacca

SEQ ID NO: 2437 - DNA, 25 bp, synthetic construct
  source 1..25: mol_type = other DNA
agactgggcaactgcagtgagacca

SEQ ID NO: 2438 - DNA, 25 bp, synthetic construct
  source 1..25: mol_type = other DNA
agactgggcaactgcagtggaacca

SEQ ID NO: 2439 - DNA, 25 bp, synthetic construct
  source 1..25: mol_type = other DNA
agactgggcagctacaatgggacca

SEQ ID NO: 2440 - DNA, 25 bp, synthetic construct
  source 1..25: mol_type = other DNA
agactgggcagctacagtaggacca

SEQ ID NO: 2441 - DNA, 25 bp, synthetic construct
  source 1..25: mol_type = other DNA
agactgggcagctacagtgagacca

SEQ ID NO: 2442 - DNA, 25 bp, synthetic construct
  source 1..25: mol_type = other DNA
agactgggcagctacagtggaacca

SEQ ID NO: 2443 - DNA, 25 bp, synthetic construct
  source 1..25: mol_type = other DNA
agactgggcagctgcaataggacca

SEQ ID NO: 2444 - DNA, 25 bp, synthetic construct
  source 1..25: mol_type = other DNA
agactgggcagctgcaatgagacca

SEQ ID NO: 2445 - DNA, 25 bp, synthetic construct
  source 1..25: mol_type = other DNA
agactgggcagctgcaatggaacca

SEQ ID NO: 2446 - DNA, 25 bp, synthetic construct
  source 1..25: mol_type = other DNA
agactgggcagctgcagtaagacca

SEQ ID NO: 2447 - DNA, 25 bp, synthetic construct
  source 1..25: mol_type = other DNA
agactgggcagctgcagtagaacca

SEQ ID NO: 2448 - DNA, 25 bp, synthetic construct
  source 1..25: mol_type = other DNA
aaactgggcaactgcagtgggacca

SEQ ID NO: 2449 - DNA, 25 bp, synthetic construct
  source 1..25: mol_type = other DNA
aaactgggcagctacagtgggacca

SEQ ID NO: 2450 - DNA, 25 bp, synthetic construct
  source 1..25: mol_type = other DNA
aaactgggcagctgcaatgggacca

SEQ ID NO: 2451 - DNA, 25 bp, synthetic construct
  source 1..25: mol_type = other DNA
aaactgggcagctgcagtaggacca

SEQ ID NO: 2452 - DNA, 25 bp, synthetic construct
  source 1..25: mol_type = other DNA
aaactgggcagctgcagtgagacca

SEQ ID NO: 2453 - DNA, 25 bp, synthetic construct
  source 1..25: mol_type = other DNA
aaactgggcagctgcagtggaacca

SEQ ID NO: 2454 - DNA, 25 bp, synthetic construct
  source 1..25: mol_type = other DNA
aaactaggcagctgcagtgggacca

SEQ ID NO: 2455 - DNA, 25 bp, synthetic construct
  source 1..25: mol_type = other DNA
aaactgagcagctgcagtgggacca

SEQ ID NO: 2456 - DNA, 25 bp, synthetic construct
  source 1..25: mol_type = other DNA
aaactggacagctgcagtgggacca

SEQ ID NO: 2457 - DNA, 25 bp, synthetic construct
  source 1..25: mol_type = other DNA
agactgggcagctgcagtgaaacca

SEQ ID NO: 2458 - DNA, 25 bp, synthetic construct
  source 1..25: mol_type = other DNA
agactaggcaactgcagtgggacca

SEQ ID NO: 2459 - DNA, 25 bp, synthetic construct
  source 1..25: mol_type = other DNA
agactaggcagctacagtgggacca

SEQ ID NO: 2460 - DNA, 25 bp, synthetic construct
  source 1..25: mol_type = other DNA
agactaggcagctgcaatgggacca

SEQ ID NO: 2461 - DNA, 25 bp, synthetic construct
  source 1..25: mol_type = other DNA
agactaggcagctgcagtaggacca

SEQ ID NO: 2462 - DNA, 25 bp, synthetic construct
  source 1..25: mol_type = other DNA
agactaggcagctgcagtgagacca

SEQ ID NO: 2463 - DNA, 25 bp, synthetic construct
  source 1..25: mol_type = other DNA
agactaggcagctgcagtggaacca

SEQ ID NO: 2464 - DNA, 25 bp, synthetic construct
  source 1..25: mol_type = other DNA
agactaagcagctgcagtgggacca

SEQ ID NO: 2465 - DNA, 25 bp, synthetic construct
  source 1..25: mol_type = other DNA
agactagacagctgcagtgggacca

SEQ ID NO: 2466 - DNA, 25 bp, synthetic construct
  source 1..25: mol_type = other DNA
agactgagcaactgcagtgggacca

SEQ ID NO: 2467 - DNA, 25 bp, synthetic construct
  source 1..25: mol_type = other DNA
agactgagcagctacagtgggacca

SEQ ID NO: 2468 - DNA, 25 bp, synthetic construct
  source 1..25: mol_type = other DNA
agactgagcagctgcaatgggacca

SEQ ID NO: 2469 - DNA, 25 bp, synthetic construct
  source 1..25: mol_type = other DNA
agactgagcagctgcagtaggacca

SEQ ID NO: 2470 - DNA, 25 bp, synthetic construct
  source 1..25: mol_type = other DNA
agactgagcagctgcagtgagacca

SEQ ID NO: 2471 - DNA, 25 bp, synthetic construct
  source 1..25: mol_type = other DNA
agactgagcagctgcagtggaacca

SEQ ID NO: 2472 - DNA, 25 bp, synthetic construct
  source 1..25: mol_type = other DNA
agactgaacagctgcagtgggacca

SEQ ID NO: 2473 - DNA, 25 bp, synthetic construct
  source 1..25: mol_type = other DNA
agactggacaactgcagtgggacca

SEQ ID NO: 2474 - DNA, 25 bp, synthetic construct
  source 1..25: mol_type = other DNA
agactggacagctacagtgggacca

SEQ ID NO: 2475 - DNA, 25 bp, synthetic construct
  source 1..25: mol_type = other DNA
agactggacagctgcaatgggacca

SEQ ID NO: 2476 - DNA, 25 bp, synthetic construct
  source 1..25: mol_type = other DNA
agactggacagctgcagtaggacca

SEQ ID NO: 2477 - DNA, 25 bp, synthetic construct
  source 1..25: mol_type = other DNA
agactggacagctgcagtgagacca

SEQ ID NO: 2478 - DNA, 25 bp, synthetic construct
  source 1..25: mol_type = other DNA
agactggacagctgcagtggaacca

SEQ ID NO: 2479 - DNA, 25 bp, synthetic construct
  source 1..25: mol_type = other DNA
agactgggcagctgcagtggaacca

SEQ ID NO: 2480 - DNA, 25 bp, synthetic construct
  source 1..25: mol_type = other DNA
aagactgggcagctgcagtgggacc

SEQ ID NO: 2481 - DNA, 25 bp, synthetic construct
  source 1..25: mol_type = other DNA
aagactgggtagctgcagtgggacc

SEQ ID NO: 2482 - DNA, 25 bp, synthetic construct
  source 1..25: mol_type = other DNA
aagactgggcatctgcagtgggacc

SEQ ID NO: 2483 - DNA, 25 bp, synthetic construct
  source 1..25: mol_type = other DNA
aagactgggcagttgcagtgggacc

SEQ ID NO: 2484 - DNA, 25 bp, synthetic construct
  source 1..25: mol_type = other DNA
aagactgggcagcttcagtgggacc

SEQ ID NO: 2485 - DNA, 25 bp, synthetic construct
  source 1..25: mol_type = other DNA
aagactgggcagctgtagtgggacc

SEQ ID NO: 2486 - DNA, 25 bp, synthetic construct
  source 1..25: mol_type = other DNA
aagactgggcagctgcattgggacc

SEQ ID NO: 2487 - DNA, 25 bp, synthetic construct
  source 1..25: mol_type = other DNA
aagactgggcagctgcagttggacc

SEQ ID NO: 2488 - DNA, 25 bp, synthetic construct
  source 1..25: mol_type = other DNA
aagactgggcagctgcagtgtgacc

SEQ ID NO: 2489 - DNA, 25 bp, synthetic construct
  source 1..25: mol_type = other DNA
aagactgggcagctgcagtggtacc

SEQ ID NO: 2490 - DNA, 25 bp, synthetic construct
  source 1..25: mol_type = other DNA
aagactgggcagctgcagtgggatc

SEQ ID NO: 2491 - DNA, 25 bp, synthetic construct
  source 1..25: mol_type = other DNA
aagactgggcagctgcagtgggact

SEQ ID NO: 2492 - DNA, 25 bp, synthetic construct
  source 1..25: mol_type = other DNA
aatactgggcagctgcagtgggacc

SEQ ID NO: 2493 - DNA, 25 bp, synthetic construct
  source 1..25: mol_type = other DNA
aagattgggcagctgcagtgggacc

SEQ ID NO: 2494 - DNA, 25 bp, synthetic construct
  source 1..25: mol_type = other DNA
aagacttggcagctgcagtgggacc

SEQ ID NO: 2495 - DNA, 25 bp, synthetic construct
  source 1..25: mol_type = other DNA
aagactgtgcagctgcagtgggacc

SEQ ID NO: 2496 - DNA, 25 bp, synthetic construct
  source 1..25: mol_type = other DNA
aagactggtcagctgcagtgggacc

SEQ ID NO: 2497 - DNA, 25 bp, synthetic construct
  source 1..25: mol_type = other DNA
aagactgggcaactacagtgggacc

SEQ ID NO: 2498 - DNA, 25 bp, synthetic construct
  source 1..25: mol_type = other DNA
aagactgggcaactgcaatgggacc

SEQ ID NO: 2499 - DNA, 25 bp, synthetic construct
  source 1..25: mol_type = other DNA
aagactgggcaactgcagtaggacc

SEQ ID NO: 2500 - DNA, 25 bp, synthetic construct
  source 1..25: mol_type = other DNA
aagactgggcaactgcagtgagacc

SEQ ID NO: 2501 - DNA, 25 bp, synthetic construct
  source 1..25: mol_type = other DNA
aagactgggcaactgcagtggaacc

SEQ ID NO: 2502 - DNA, 25 bp, synthetic construct
  source 1..25: mol_type = other DNA
aagactgggcagctacaatgggacc

SEQ ID NO: 2503 - DNA, 25 bp, synthetic construct
  source 1..25: mol_type = other DNA
aagactgggcagctacagtaggacc

SEQ ID NO: 2504 - DNA, 25 bp, synthetic construct
  source 1..25: mol_type = other DNA
aagactgggcagctacagtgagacc

SEQ ID NO: 2505 - DNA, 25 bp, synthetic construct
  source 1..25: mol_type = other DNA
aagactgggcagctacagtggaacc

SEQ ID NO: 2506 - DNA, 25 bp, synthetic construct
  source 1..25: mol_type = other DNA
aagactgggcagctgcaataggacc

SEQ ID NO: 2507 - DNA, 25 bp, synthetic construct
  source 1..25: mol_type = other DNA
aagactgggcagctgcaatgagacc

SEQ ID NO: 2508 - DNA, 25 bp, synthetic construct
  source 1..25: mol_type = other DNA
aagactgggcagctgcaatggaacc

SEQ ID NO: 2509 - DNA, 25 bp, synthetic construct
  source 1..25: mol_type = other DNA
aagactgggcagctgcagtaagacc

SEQ ID NO: 2510 - DNA, 25 bp, synthetic construct
  source 1..25: mol_type = other DNA
aagactgggcagctgcagtagaacc

SEQ ID NO: 2511 - DNA, 25 bp, synthetic construct
  source 1..25: mol_type = other DNA
aagactgggcagctgcagtgaaacc

SEQ ID NO: 2512 - DNA, 25 bp, synthetic construct
  source 1..25: mol_type = other DNA
aaaactgggcaactgcagtgggacc

SEQ ID NO: 2513 - DNA, 25 bp, synthetic construct
  source 1..25: mol_type = other DNA
aaaactgggcagctacagtgggacc

SEQ ID NO: 2514 - DNA, 25 bp, synthetic construct
  source 1..25: mol_type = other DNA
aaaactgggcagctgcaatgggacc

SEQ ID NO: 2515 - DNA, 25 bp, synthetic construct
  source 1..25: mol_type = other DNA
aaaactgggcagctgcagtaggacc

SEQ ID NO: 2516 - DNA, 25 bp, synthetic construct
  source 1..25: mol_type = other DNA
aaaactgggcagctgcagtgagacc

SEQ ID NO: 2517 - DNA, 25 bp, synthetic construct
  source 1..25: mol_type = other DNA
aaaactgggcagctgcagtggaacc

SEQ ID NO: 2518 - DNA, 25 bp, synthetic construct
  source 1..25: mol_type = other DNA
aaaactaggcagctgcagtgggacc

SEQ ID NO: 2519 - DNA, 25 bp, synthetic construct
  source 1..25: mol_type = other DNA
aaaactgagcagctgcagtgggacc

SEQ ID NO: 2520 - DNA, 25 bp, synthetic construct
  source 1..25: mol_type = other DNA
aaaactggacagctgcagtgggacc

SEQ ID NO: 2521 - DNA, 25 bp, synthetic construct
  source 1..25: mol_type = other DNA
aagactaggcaactgcagtgggacc

SEQ ID NO: 2522 - DNA, 25 bp, synthetic construct
  source 1..25: mol_type = other DNA
aagactaggcagctacagtgggacc

SEQ ID NO: 2523 - DNA, 25 bp, synthetic construct
  source 1..25: mol_type = other DNA
aagactaggcagctgcaatgggacc

SEQ ID NO: 2524 - DNA, 25 bp, synthetic construct
  source 1..25: mol_type = other DNA
aagactaggcagctgcagtaggacc

SEQ ID NO: 2525 - DNA, 25 bp, synthetic construct
  source 1..25: mol_type = other DNA
aagactaggcagctgcagtgagacc

SEQ ID NO: 2526 - DNA, 25 bp, synthetic construct
  source 1..25: mol_type = other DNA
aagactaggcagctgcagtggaacc

SEQ ID NO: 2527 - DNA, 25 bp, synthetic construct
  source 1..25: mol_type = other DNA
aagactaagcagctgcagtgggacc

SEQ ID NO: 2528 - DNA, 25 bp, synthetic construct
  source 1..25: mol_type = other DNA
aagactagacagctgcagtgggacc

SEQ ID NO: 2529 - DNA, 25 bp, synthetic construct
  source 1..25: mol_type = other DNA
aagactgagcaactgcagtgggacc

SEQ ID NO: 2530 - DNA, 25 bp, synthetic construct
  source 1..25: mol_type = other DNA
aagactgagcagctacagtgggacc

SEQ ID NO: 2531 - DNA, 25 bp, synthetic construct
  source 1..25: mol_type = other DNA
aagactgagcagctgcaatgggacc

SEQ ID NO: 2532 - DNA, 25 bp, synthetic construct
  source 1..25: mol_type = other DNA
aagactgagcagctgcagtaggacc

SEQ ID NO: 2533 - DNA, 25 bp, synthetic construct
  source 1..25: mol_type = other DNA
aagactgagcagctgcagtgagacc

SEQ ID NO: 2534 - DNA, 25 bp, synthetic construct
  source 1..25: mol_type = other DNA
aagactgagcagctgcagtggaacc

SEQ ID NO: 2535 - DNA, 25 bp, synthetic construct
  source 1..25: mol_type = other DNA
aagactgaacagctgcagtgggacc

SEQ ID NO: 2536 - DNA, 25 bp, synthetic construct
  source 1..25: mol_type = other DNA
aagactggacaactgcagtgggacc

SEQ ID NO: 2537 - DNA, 25 bp, synthetic construct
  source 1..25: mol_type = other DNA
aagactggacagctacagtgggacc

SEQ ID NO: 2538 - DNA, 25 bp, synthetic construct
  source 1..25: mol_type = other DNA
aagactggacagctgcaatgggacc

SEQ ID NO: 2539 - DNA, 25 bp, synthetic construct
  source 1..25: mol_type = other DNA
aagactggacagctgcagtaggacc

SEQ ID NO: 2540 - DNA, 25 bp, synthetic construct
  source 1..25: mol_type = other DNA
aagactggacagctgcagtgagacc

SEQ ID NO: 2541 - DNA, 25 bp, synthetic construct
  source 1..25: mol_type = other DNA
aagactggacagctgcagtggaacc

SEQ ID NO: 2542 - DNA, 25 bp, synthetic construct
  source 1..25: mol_type = other DNA
aagactgggcagctgcagtggaacc

SEQ ID NO: 2543 - DNA, 25 bp, synthetic construct
  source 1..25: mol_type = other DNA
gaagactgggcagctgcagtgggac

SEQ ID NO: 2544 - DNA, 25 bp, synthetic construct
  source 1..25: mol_type = other DNA
taagactgggcagctgcagtgggac

SEQ ID NO: 2545 - DNA, 25 bp, synthetic construct
  source 1..25: mol_type = other DNA
gaagactggtcagctgcagtgggac

SEQ ID NO: 2546 - DNA, 25 bp, synthetic construct
  source 1..25: mol_type = other DNA
gaagactgggtagctgcagtgggac

SEQ ID NO: 2547 - DNA, 25 bp, synthetic construct
  source 1..25: mol_type = other DNA
gaagactgggcatctgcagtgggac

SEQ ID NO: 2548 - DNA, 25 bp, synthetic construct
  source 1..25: mol_type = other DNA
gaagactgggcagttgcagtgggac

SEQ ID NO: 2549 - DNA, 25 bp, synthetic construct
  source 1..25: mol_type = other DNA
gaagactgggcagcttcagtgggac

SEQ ID NO: 2550 - DNA, 25 bp, synthetic construct
  source 1..25: mol_type = other DNA
gaagactgggcagctgtagtgggac

SEQ ID NO: 2551 - DNA, 25 bp, synthetic construct
  source 1..25: mol_type = other DNA
gaagactgggcagctgcattgggac

SEQ ID NO: 2552 - DNA, 25 bp, synthetic construct
  source 1..25: mol_type = other DNA
gaagactgggcagctgcagttggac

SEQ ID NO: 2553 - DNA, 25 bp, synthetic construct
  source 1..25: mol_type = other DNA
gaagactgggcagctgcagtgtgac

SEQ ID NO: 2554 - DNA, 25 bp, synthetic construct
  source 1..25: mol_type = other DNA
gaagactgggcagctgcagtggtac

SEQ ID NO: 2555 - DNA, 25 bp, synthetic construct
  source 1..25: mol_type = other DNA
gaagactgggcagctgcagtgggat

SEQ ID NO: 2556 - DNA, 25 bp, synthetic construct
  source 1..25: mol_type = other DNA
gaatactgggcagctgcagtgggac

SEQ ID NO: 2557 - DNA, 25 bp, synthetic construct
  source 1..25: mol_type = other DNA
gaagattgggcagctgcagtgggac

SEQ ID NO: 2558 - DNA, 25 bp, synthetic construct
  source 1..25: mol_type = other DNA
gaagacttggcagctgcagtgggac

SEQ ID NO: 2559 - DNA, 25 bp, synthetic construct
  source 1..25: mol_type = other DNA
gaagactgtgcagctgcagtgggac

SEQ ID NO: 2560 - DNA, 25 bp, synthetic construct
  source 1..25: mol_type = other DNA
aaagactggacagctgcagtgggac

SEQ ID NO: 2561 - DNA, 25 bp, synthetic construct
  source 1..25: mol_type = other DNA
aaagactgggcaactgcagtgggac

SEQ ID NO: 2562 - DNA, 25 bp, synthetic construct
  source 1..25: mol_type = other DNA
aaagactgggcagctacagtgggac

SEQ ID NO: 2563 - DNA, 25 bp, synthetic construct
  source 1..25: mol_type = other DNA
aaagactgggcagctgcaatgggac

SEQ ID NO: 2564 - DNA, 25 bp, synthetic construct
  source 1..25: mol_type = other DNA
aaagactgggcagctgcagtaggac

SEQ ID NO: 2565 - DNA, 25 bp, synthetic construct
  source 1..25: mol_type = other DNA
aaagactgggcagctgcagtgagac

SEQ ID NO: 2566 - DNA, 25 bp, synthetic construct
  source 1..25: mol_type = other DNA
aaagactgggcagctgcagtggaac

SEQ ID NO: 2567 - DNA, 25 bp, synthetic construct
  source 1..25: mol_type = other DNA
aaaaactgggcagctgcagtgggac

SEQ ID NO: 2568 - DNA, 25 bp, synthetic construct
  source 1..25: mol_type = other DNA
aaagactaggcagctgcagtgggac

SEQ ID NO: 2569 - DNA, 25 bp, synthetic construct
  source 1..25: mol_type = other DNA
aaagactgagcagctgcagtgggac

SEQ ID NO: 2570 - DNA, 25 bp, synthetic construct
  source 1..25: mol_type = other DNA
gaagactggacaactgcagtgggac

SEQ ID NO: 2571 - DNA, 25 bp, synthetic construct
  source 1..25: mol_type = other DNA
gaagactggacagctacagtgggac

SEQ ID NO: 2572 - DNA, 25 bp, synthetic construct
  source 1..25: mol_type = other DNA
gaagactggacagctgcaatgggac

SEQ ID NO: 2573 - DNA, 25 bp, synthetic construct
  source 1..25: mol_type = other DNA
gaagactggacagctgcagtaggac

SEQ ID NO: 2574 - DNA, 25 bp, synthetic construct
  source 1..25: mol_type = other DNA
gaagactggacagctgcagtgagac

SEQ ID NO: 2575 - DNA, 25 bp, synthetic construct
  source 1..25: mol_type = other DNA
gaagactggacagctgcagtggaac

SEQ ID NO: 2576 - DNA, 25 bp, synthetic construct
  source 1..25: mol_type = other DNA
gaagactgggcaactacagtgggac

SEQ ID NO: 2577 - DNA, 25 bp, synthetic construct
  source 1..25: mol_type = other DNA
gaagactgggcaactgcaatgggac

SEQ ID NO: 2578 - DNA, 25 bp, synthetic construct
  source 1..25: mol_type = other DNA
gaagactgggcaactgcagtaggac

SEQ ID NO: 2579 - DNA, 25 bp, synthetic construct
  source 1..25: mol_type = other DNA
gaagactgggcaactgcagtgagac

SEQ ID NO: 2580 - DNA, 25 bp, synthetic construct
  source 1..25: mol_type = other DNA
gaagactgggcaactgcagtggaac

SEQ ID NO: 2581 - DNA, 25 bp, synthetic construct
  source 1..25: mol_type = other DNA
gaagactgggcagctacaatgggac

SEQ ID NO: 2582 - DNA, 25 bp, synthetic construct
  source 1..25: mol_type = other DNA
gaagactgggcagctacagtaggac

SEQ ID NO: 2583 - DNA, 25 bp, synthetic construct
  source 1..25: mol_type = other DNA
gaagactgggcagctacagtgagac

SEQ ID NO: 2584 - DNA, 25 bp, synthetic construct
  source 1..25: mol_type = other DNA
gaagactgggcagctacagtggaac

SEQ ID NO: 2585 - DNA, 25 bp, synthetic construct
  source 1..25: mol_type = other DNA
gaagactgggcagctgcaataggac

SEQ ID NO: 2586 - DNA, 25 bp, synthetic construct
  source 1..25: mol_type = other DNA
gaagactgggcagctgcaatgagac

SEQ ID NO: 2587 - DNA, 25 bp, synthetic construct
  source 1..25: mol_type = other DNA
gaagactgggcagctgcaatggaac

SEQ ID NO: 2588 - DNA, 25 bp, synthetic construct
  source 1..25: mol_type = other DNA
gaagactgggcagctgcagtaagac

SEQ ID NO: 2589 - DNA, 25 bp, synthetic construct
  source 1..25: mol_type = other DNA
gaagactgggcagctgcagtagaac

SEQ ID NO: 2590 - DNA, 25 bp, synthetic construct
  source 1..25: mol_type = other DNA
gaagactgggcagctgcagtgaaac

SEQ ID NO: 2591 - DNA, 25 bp, synthetic construct
  source 1..25: mol_type = other DNA
gaaaactggacagctgcagtgggac

SEQ ID NO: 2592 - DNA, 25 bp, synthetic construct
  source 1..25: mol_type = other DNA
gaaaactgggcaactgcagtgggac

SEQ ID NO: 2593 - DNA, 25 bp, synthetic construct
  source 1..25: mol_type = other DNA
gaaaactgggcagctacagtgggac

SEQ ID NO: 2594 - DNA, 25 bp, synthetic construct
  source 1..25: mol_type = other DNA
gaaaactgggcagctgcaatgggac

SEQ ID NO: 2595 - DNA, 25 bp, synthetic construct
  source 1..25: mol_type = other DNA
gaaaactgggcagctgcagtaggac

SEQ ID NO: 2596 - DNA, 25 bp, synthetic construct
  source 1..25: mol_type = other DNA
gaaaactgggcagctgcagtgagac

SEQ ID NO: 2597 - DNA, 25 bp, synthetic construct
  source 1..25: mol_type = other DNA
gaaaactgggcagctgcagtggaac

SEQ ID NO: 2598 - DNA, 25 bp, synthetic construct
  source 1..25: mol_type = other DNA
gaaaactaggcagctgcagtgggac

SEQ ID NO: 2599 - DNA, 25 bp, synthetic construct
  source 1..25: mol_type = other DNA
gaaaactgagcagctgcagtgggac

SEQ ID NO: 2600 - DNA, 25 bp, synthetic construct
  source 1..25: mol_type = other DNA
gaagactagacagctgcagtgggac

SEQ ID NO: 2601 - DNA, 25 bp, synthetic construct
  source 1..25: mol_type = other DNA
gaagactaggcaactgcagtgggac

SEQ ID NO: 2602 - DNA, 25 bp, synthetic construct
  source 1..25: mol_type = other DNA
gaagactaggcagctacagtgggac

SEQ ID NO: 2603 - DNA, 25 bp, synthetic construct
  source 1..25: mol_type = other DNA
gaagactaggcagctgcaatgggac

SEQ ID NO: 2604 - DNA, 25 bp, synthetic construct
  source 1..25: mol_type = other DNA
gaagactaggcagctgcagtaggac

SEQ ID NO: 2605 - DNA, 25 bp, synthetic construct
  source 1..25: mol_type = other DNA
gaagactaggcagctgcagtgagac

SEQ ID NO: 2606 - DNA, 25 bp, synthetic construct
  source 1..25: mol_type = other DNA
gaagactaggcagctgcagtggaac

SEQ ID NO: 2607 - DNA, 25 bp, synthetic construct
  source 1..25: mol_type = other DNA
gaagactaagcagctgcagtgggac

SEQ ID NO: 2608 - DNA, 25 bp, synthetic construct
  source 1..25: mol_type = other DNA
gaagactgaacagctgcagtgggac

SEQ ID NO: 2609 - DNA, 25 bp, synthetic construct
  source 1..25: mol_type = other DNA
gaagactgagcaactgcagtgggac

SEQ ID NO: 2610 - DNA, 25 bp, synthetic construct
  source 1..25: mol_type = other DNA
gaagactgagcagctacagtgggac

SEQ ID NO: 2611 - DNA, 25 bp, synthetic construct
  source 1..25: mol_type = other DNA
gaagactgagcagctgcaatgggac

SEQ ID NO: 2612 - DNA, 25 bp, synthetic construct
  source 1..25: mol_type = other DNA
gaagactgagcagctgcagtaggac

SEQ ID NO: 2613 - DNA, 25 bp, synthetic construct
  source 1..25: mol_type = other DNA
gaagactgagcagctgcagtgagac

SEQ ID NO: 2614 - DNA, 25 bp, synthetic construct
  source 1..25: mol_type = other DNA
gaagactgagcagctgcagtggaac

SEQ ID NO: 2615 - DNA, 25 bp, synthetic construct
  source 1..25: mol_type = other DNA
gaagactgggcagctgcagtggaac

SEQ ID NO: 2616 - DNA, 25 bp, synthetic construct
  source 1..25: mol_type = other DNA
tgaagactgggcagctgcagtggga

SEQ ID NO: 2617 - DNA, 25 bp, synthetic construct
  source 1..25: mol_type = other DNA
ggaagactgtgcagctgcagtggga

SEQ ID NO: 2618 - DNA, 25 bp, synthetic construct
  source 1..25: mol_type = other DNA
ggaagactggtcagctgcagtggga

SEQ ID NO: 2619 - DNA, 25 bp, synthetic construct
  source 1..25: mol_type = other DNA
ggaagactgggtagctgcagtggga

SEQ ID NO: 2620 - DNA, 25 bp, synthetic construct
  source 1..25: mol_type = other DNA
ggaagactgggcatctgcagtggga

SEQ ID NO: 2621 - DNA, 25 bp, synthetic construct
  source 1..25: mol_type = other DNA
ggaagactgggcagttgcagtggga

SEQ ID NO: 2622 - DNA, 25 bp, synthetic construct
  source 1..25: mol_type = other DNA
ggaagactgggcagcttcagtggga

SEQ ID NO: 2623 - DNA, 25 bp, synthetic construct
  source 1..25: mol_type = other DNA
ggaagactgggcagctgtagtggga

SEQ ID NO: 2624 - DNA, 25 bp, synthetic construct
  source 1..25: mol_type = other DNA
gtaagactgggcagctgcagtggga

SEQ ID NO: 2625 - DNA, 25 bp, synthetic construct
  source 1..25: mol_type = other DNA
ggaagactgggcagctgcattggga

SEQ ID NO: 2626 - DNA, 25 bp, synthetic construct
  source 1..25: mol_type = other DNA
ggaagactgggcagctgcagttgga

SEQ ID NO: 2627 - DNA, 25 bp, synthetic construct
  source 1..25: mol_type = other DNA
ggaagactgggcagctgcagtgtga

SEQ ID NO: 2628 - DNA, 25 bp, synthetic construct
  source 1..25: mol_type = other DNA
ggaagactgggcagctgcagtggta

SEQ ID NO: 2629 - DNA, 25 bp, synthetic construct
  source 1..25: mol_type = other DNA
ggaatactgggcagctgcagtggga

SEQ ID NO: 2630 - DNA, 25 bp, synthetic construct
  source 1..25: mol_type = other DNA
ggaagattgggcagctgcagtggga

SEQ ID NO: 2631 - DNA, 25 bp, synthetic construct
  source 1..25: mol_type = other DNA
ggaagacttggcagctgcagtggga

SEQ ID NO: 2632 - DNA, 25 bp, synthetic construct
  source 1..25: mol_type = other DNA
agaagactgagcagctgcagtggga

SEQ ID NO: 2633 - DNA, 25 bp, synthetic construct
  source 1..25: mol_type = other DNA
agaagactggacagctgcagtggga

SEQ ID NO: 2634 - DNA, 25 bp, synthetic construct
  source 1..25: mol_type = other DNA
agaagactgggcaactgcagtggga

SEQ ID NO: 2635 - DNA, 25 bp, synthetic construct
  source 1..25: mol_type = other DNA
agaagactgggcagctacagtggga

SEQ ID NO: 2636 - DNA, 25 bp, synthetic construct
  source 1..25: mol_type = other DNA
aaaagactgggcagctgcagtggga

SEQ ID NO: 2637 - DNA, 25 bp, synthetic construct
  source 1..25: mol_type = other DNA
agaagactgggcagctgcaatggga

SEQ ID NO: 2638 - DNA, 25 bp, synthetic construct
  source 1..25: mol_type = other DNA
agaagactgggcagctgcagtagga

SEQ ID NO: 2639 - DNA, 25 bp, synthetic construct
  source 1..25: mol_type = other DNA
agaagactgggcagctgcagtgaga

SEQ ID NO: 2640 - DNA, 25 bp, synthetic construct
  source 1..25: mol_type = other DNA
agaagactgggcagctgcagtggaa

SEQ ID NO: 2641 - DNA, 25 bp, synthetic construct
  source 1..25: mol_type = other DNA
agaaaactgggcagctgcagtggga

SEQ ID NO: 2642 - DNA, 25 bp, synthetic construct
  source 1..25: mol_type = other DNA
agaagactaggcagctgcagtggga

SEQ ID NO: 2643 - DNA, 25 bp, synthetic construct
  source 1..25: mol_type = other DNA
ggaagactgaacagctgcagtggga

SEQ ID NO: 2644 - DNA, 25 bp, synthetic construct
  source 1..25: mol_type = other DNA
ggaagactgagcaactgcagtggga

SEQ ID NO: 2645 - DNA, 25 bp, synthetic construct
  source 1..25: mol_type = other DNA
ggaagactgagcagctacagtggga

SEQ ID NO: 2646 - DNA, 25 bp, synthetic construct
  source 1..25: mol_type = other DNA
ggaagactgagcagctgcaatggga

SEQ ID NO: 2647 - DNA, 25 bp, synthetic construct
  source 1..25: mol_type = other DNA
ggaagactgagcagctgcagtagga

SEQ ID NO: 2648 - DNA, 25 bp, synthetic construct
  source 1..25: mol_type = other DNA
ggaagactgagcagctgcagtgaga

SEQ ID NO: 2649 - DNA, 25 bp, synthetic construct
  source 1..25: mol_type = other DNA
ggaagactgagcagctgcagtggaa

SEQ ID NO: 2650 - DNA, 25 bp, synthetic construct
  source 1..25: mol_type = other DNA
ggaagactggacaactgcagtggga

SEQ ID NO: 2651 - DNA, 25 bp, synthetic construct
  source 1..25: mol_type = other DNA
ggaagactggacagctacagtggga

SEQ ID NO: 2652 - DNA, 25 bp, synthetic construct
  source 1..25: mol_type = other DNA
ggaagactggacagctgcaatggga

SEQ ID NO: 2653 - DNA, 25 bp, synthetic construct
  source 1..25: mol_type = other DNA
ggaagactggacagctgcagtagga

SEQ ID NO: 2654 - DNA, 25 bp, synthetic construct
  source 1..25: mol_type = other DNA
ggaagactggacagctgcagtgaga

SEQ ID NO: 2655 - DNA, 25 bp, synthetic construct
  source 1..25: mol_type = other DNA
ggaagactggacagctgcagtggaa

SEQ ID NO: 2656 - DNA, 25 bp, synthetic construct
  source 1..25: mol_type = other DNA
ggaagactgggcaactacagtggga

SEQ ID NO: 2657 - DNA, 25 bp, synthetic construct
  source 1..25: mol_type = other DNA
ggaagactgggcaactgcaatggga

SEQ ID NO: 2658 - DNA, 25 bp, synthetic construct
  source 1..25: mol_type = other DNA
ggaagactgggcaactgcagtagga

SEQ ID NO: 2659 - DNA, 25 bp, synthetic construct
  source 1..25: mol_type = other DNA
ggaagactgggcaactgcagtgaga

SEQ ID NO: 2660 - DNA, 25 bp, synthetic construct
  source 1..25: mol_type = other DNA
ggaagactgggcaactgcagtggaa

SEQ ID NO: 2661 - DNA, 25 bp, synthetic construct
  source 1..25: mol_type = other DNA
ggaagactgggcagctacaatggga

SEQ ID NO: 2662 - DNA, 25 bp, synthetic construct
  source 1..25: mol_type = other DNA
ggaagactgggcagctacagtagga

SEQ ID NO: 2663 - DNA, 25 bp, synthetic construct
  source 1..25: mol_type = other DNA
ggaagactgggcagctacagtgaga

SEQ ID NO: 2664 - DNA, 25 bp, synthetic construct
  source 1..25: mol_type = other DNA
ggaagactgggcagctacagtggaa

SEQ ID NO: 2665 - DNA, 25 bp, synthetic construct
  source 1..25: mol_type = other DNA
gaaagactgagcagctgcagtggga

SEQ ID NO: 2666 - DNA, 25 bp, synthetic construct
  source 1..25: mol_type = other DNA
gaaagactggacagctgcagtggga

SEQ ID NO: 2667 - DNA, 25 bp, synthetic construct
  source 1..25: mol_type = other DNA
gaaagactgggcaactgcagtggga

SEQ ID NO: 2668 - DNA, 25 bp, synthetic construct
  source 1..25: mol_type = other DNA
gaaagactgggcagctacagtggga

SEQ ID NO: 2669 - DNA, 25 bp, synthetic construct
  source 1..25: mol_type = other DNA
gaaagactgggcagctgcaatggga

SEQ ID NO: 2670 - DNA, 25 bp, synthetic construct
  source 1..25: mol_type = other DNA
gaaagactgggcagctgcagtagga

SEQ ID NO: 2671 - DNA, 25 bp, synthetic construct
  source 1..25: mol_type = other DNA
gaaagactgggcagctgcagtgaga

SEQ ID NO: 2672 - DNA, 25 bp, synthetic construct
  source 1..25: mol_type = other DNA
gaaagactgggcagctgcagtggaa

SEQ ID NO: 2673 - DNA, 25 bp, synthetic construct
  source 1..25: mol_type = other DNA
gaaaaactgggcagctgcagtggga

SEQ ID NO: 2674 - DNA, 25 bp, synthetic construct
  source 1..25: mol_type = other DNA
gaaagactaggcagctgcagtggga

SEQ ID NO: 2675 - DNA, 25 bp, synthetic construct
  source 1..25: mol_type = other DNA
ggaagactgggcagctgcaatagga

SEQ ID NO: 2676 - DNA, 25 bp, synthetic construct
  source 1..25: mol_type = other DNA
ggaagactgggcagctgcaatgaga

SEQ ID NO: 2677 - DNA, 25 bp, synthetic construct
  source 1..25: mol_type = other DNA
ggaagactgggcagctgcaatggaa

SEQ ID NO: 2678 - DNA, 25 bp, synthetic construct
  source 1..25: mol_type = other DNA
ggaagactgggcagctgcagtaaga

SEQ ID NO: 2679 - DNA, 25 bp, synthetic construct
  source 1..25: mol_type = other DNA
ggaagactgggcagctgcagtagaa

SEQ ID NO: 2680 - DNA, 25 bp, synthetic construct
  source 1..25: mol_type = other DNA
ggaagactgggcagctgcagtgaaa

SEQ ID NO: 2681 - DNA, 25 bp, synthetic construct
  source 1..25: mol_type = other DNA
ggaaaactgagcagctgcagtggga

SEQ ID NO: 2682 - DNA, 25 bp, synthetic construct
  source 1..25: mol_type = other DNA
ggaaaactggacagctgcagtggga

SEQ ID NO: 2683 - DNA, 25 bp, synthetic construct
  source 1..25: mol_type = other DNA
ggaaaactgggcaactgcagtggga

SEQ ID NO: 2684 - DNA, 25 bp, synthetic construct
  source 1..25: mol_type = other DNA
ggaaaactgggcagctacagtggga

SEQ ID NO: 2685 - DNA, 25 bp, synthetic construct
  source 1..25: mol_type = other DNA
ggaaaactgggcagctgcaatggga

SEQ ID NO: 2686 - DNA, 25 bp, synthetic construct
  source 1..25: mol_type = other DNA
ggaaaactgggcagctgcagtagga

SEQ ID NO: 2687 - DNA, 25 bp, synthetic construct
  source 1..25: mol_type = other DNA
ggaaaactgggcagctgcagtgaga

SEQ ID NO: 2688 - DNA, 25 bp, synthetic construct
  source 1..25: mol_type = other DNA
ggaaaactgggcagctgcagtggaa

SEQ ID NO: 2689 - DNA, 25 bp, synthetic construct
  source 1..25: mol_type = other DNA
ggaaaactaggcagctgcagtggga

SEQ ID NO: 2690 - DNA, 25 bp, synthetic construct
  source 1..25: mol_type = other DNA
ggaagactaagcagctgcagtggga

SEQ ID NO: 2691 - DNA, 25 bp, synthetic construct
  source 1..25: mol_type = other DNA
ggaagactagacagctgcagtggga

SEQ ID NO: 2692 - DNA, 25 bp, synthetic construct
  source 1..25: mol_type = other DNA
ggaagactaggcaactgcagtggga

SEQ ID NO: 2693 - DNA, 25 bp, synthetic construct
  source 1..25: mol_type = other DNA
ggaagactaggcagctacagtggga

SEQ ID NO: 2694 - DNA, 25 bp, synthetic construct
  source 1..25: mol_type = other DNA
ggaagactaggcagctgcaatggga

SEQ ID NO: 2695 - DNA, 25 bp, synthetic construct
  source 1..25: mol_type = other DNA
ggaagactaggcagctgcagtagga

SEQ ID NO: 2696 - DNA, 25 bp, synthetic construct
  source 1..25: mol_type = other DNA
ggaagactaggcagctgcagtgaga

SEQ ID NO: 2697 - DNA, 25 bp, synthetic construct
  source 1..25: mol_type = other DNA
ggaagactaggcagctgcagtggaa

SEQ ID NO: 2698 - DNA, 25 bp, synthetic construct
  source 1..25: mol_type = other DNA
ggaagactgggcagctgcagtggaa

SEQ ID NO: 2699 - DNA, 25 bp, synthetic construct
  source 1..25: mol_type = other DNA
tggaagactgggcagctgcagtggg

SEQ ID NO: 2700 - DNA, 25 bp, synthetic construct
  source 1..25: mol_type = other DNA
tggaagacttggcagctgcagtggg

SEQ ID NO: 2701 - DNA, 25 bp, synthetic construct
  source 1..25: mol_type = other DNA
tggaagactgtgcagctgcagtggg

SEQ ID NO: 2702 - DNA, 25 bp, synthetic construct
  source 1..25: mol_type = other DNA
tggaagactggtcagctgcagtggg

SEQ ID NO: 2703 - DNA, 25 bp, synthetic construct
  source 1..25: mol_type = other DNA
tggaagactgggtagctgcagtggg

SEQ ID NO: 2704 - DNA, 25 bp, synthetic construct
  source 1..25: mol_type = other DNA
tggaagactgggcatctgcagtggg

SEQ ID NO: 2705 - DNA, 25 bp, synthetic construct
  source 1..25: mol_type = other DNA
tggaagactgggcagttgcagtggg

SEQ ID NO: 2706 - DNA, 25 bp, synthetic construct
  source 1..25: mol_type = other DNA
tggaagactgggcagcttcagtggg

SEQ ID NO: 2707 - DNA, 25 bp, synthetic construct
  source 1..25: mol_type = other DNA
tggaagactgggcagctgtagtggg

SEQ ID NO: 2708 - DNA, 25 bp, synthetic construct
  source 1..25: mol_type = other DNA
ttgaagactgggcagctgcagtggg

SEQ ID NO: 2709 - DNA, 25 bp, synthetic construct
  source 1..25: mol_type = other DNA
tggaagactgggcagctgcattggg

SEQ ID NO: 2710 - DNA, 25 bp, synthetic construct
  source 1..25: mol_type = other DNA
tggaagactgggcagctgcagttgg

SEQ ID NO: 2711 - DNA, 25 bp, synthetic construct
  source 1..25: mol_type = other DNA
tggaagactgggcagctgcagtgtg

SEQ ID NO: 2712 - DNA, 25 bp, synthetic construct
  source 1..25: mol_type = other DNA
tgtaagactgggcagctgcagtggg

SEQ ID NO: 2713 - DNA, 25 bp, synthetic construct
  source 1..25: mol_type = other DNA
tggaatactgggcagctgcagtggg

SEQ ID NO: 2714 - DNA, 25 bp, synthetic construct
  source 1..25: mol_type = other DNA
tggaagattgggcagctgcagtggg

SEQ ID NO: 2715 - DNA, 25 bp, synthetic construct
  source 1..25: mol_type = other DNA
tggaagactaagcagctgcagtggg

SEQ ID NO: 2716 - DNA, 25 bp, synthetic construct
  source 1..25: mol_type = other DNA
tggaagactagacagctgcagtggg

SEQ ID NO: 2717 - DNA, 25 bp, synthetic construct
  source 1..25: mol_type = other DNA
tggaagactaggcaactgcagtggg

SEQ ID NO: 2718 - DNA, 25 bp, synthetic construct
  source 1..25: mol_type = other DNA
tggaagactaggcagctacagtggg

SEQ ID NO: 2719 - DNA, 25 bp, synthetic construct
  source 1..25: mol_type = other DNA
tggaagactaggcagctgcaatggg

SEQ ID NO: 2720 - DNA, 25 bp, synthetic construct
  source 1..25: mol_type = other DNA
tggaagactaggcagctgcagtagg

SEQ ID NO: 2721 - DNA, 25 bp, synthetic construct
  source 1..25: mol_type = other DNA
tggaagactaggcagctgcagtgag

SEQ ID NO: 2722 - DNA, 25 bp, synthetic construct
  source 1..25: mol_type = other DNA
tggaagactaggcagctgcagtgga

SEQ ID NO: 2723 - DNA, 25 bp, synthetic construct
  source 1..25: mol_type = other DNA
tggaagactgaacagctgcagtggg

SEQ ID NO: 2724 - DNA, 25 bp, synthetic construct
  source 1..25: mol_type = other DNA
tggaagactgagcaactgcagtggg

SEQ ID NO: 2725 - DNA, 25 bp, synthetic construct
  source 1..25: mol_type = other DNA
tggaagactgagcagctacagtggg

SEQ ID NO: 2726 - DNA, 25 bp, synthetic construct
  source 1..25: mol_type = other DNA; mol_type = other DNA
tggaagactgagcagctgcaatggg

SEQ ID NO: 2727 - DNA, 25 bp, synthetic construct
  source 1..25: mol_type = other DNA; mol_type = other DNA
tggaagactgagcagctgcagtagg

SEQ ID NO: 2728 - DNA, 25 bp, synthetic construct
  source 1..25: mol_type = other DNA; mol_type = other DNA
tggaagactgagcagctgcagtgag

SEQ ID NO: 2729 - DNA, 25 bp, synthetic construct
  source 1..25: mol_type = other DNA; mol_type = other DNA
tggaagactgagcagctgcagtgga

SEQ ID NO: 2730 - DNA, 25 bp, synthetic construct
  source 1..25: mol_type = other DNA; mol_type = other DNA
tggaagactggacaactgcagtggg

SEQ ID NO: 2731 - DNA, 25 bp, synthetic construct
  source 1..25: mol_type = other DNA; mol_type = other DNA
tggaagactggacagctacagtggg

SEQ ID NO: 2732 - DNA, 25 bp, synthetic construct
  source 1..25: mol_type = other DNA; mol_type = other DNA
tggaagactggacagctgcaatggg

SEQ ID NO: 2733 - DNA, 25 bp, synthetic construct
  source 1..25: mol_type = other DNA; mol_type = other DNA
tggaagactggacagctgcagtagg

SEQ ID NO: 2734 - DNA, 25 bp, synthetic construct
  source 1..25: mol_type = other DNA; mol_type = other DNA
tggaagactggacagctgcagtgag

SEQ ID NO: 2735 - DNA, 25 bp, synthetic construct
  source 1..25: mol_type = other DNA; mol_type = other DNA
tggaagactggacagctgcagtgga

SEQ ID NO: 2736 - DNA, 25 bp, synthetic construct
  source 1..25: mol_type = other DNA; mol_type = other DNA
tggaagactgggcaactacagtggg

SEQ ID NO: 2737 - DNA, 25 bp, synthetic construct
  source 1..25: mol_type = other DNA; mol_type = other DNA
tggaagactgggcaactgcaatggg

SEQ ID NO: 2738 - DNA, 25 bp, synthetic construct
  source 1..25: mol_type = other DNA; mol_type = other DNA
tggaagactgggcaactgcagtagg

SEQ ID NO: 2739 - DNA, 25 bp, synthetic construct
  source 1..25: mol_type = other DNA; mol_type = other DNA
tggaagactgggcaactgcagtgag

SEQ ID NO: 2740 - DNA, 25 bp, synthetic construct
  source 1..25: mol_type = other DNA; mol_type = other DNA
tggaagactgggcaactgcagtgga

SEQ ID NO: 2741 - DNA, 25 bp, synthetic construct
  source 1..25: mol_type = other DNA; mol_type = other DNA
tggaagactgggcagctacaatggg

SEQ ID NO: 2742 - DNA, 25 bp, synthetic construct
  source 1..25: mol_type = other DNA; mol_type = other DNA
tggaagactgggcagctacagtagg

SEQ ID NO: 2743 - DNA, 25 bp, synthetic construct
  source 1..25: mol_type = other DNA; mol_type = other DNA
tggaagactgggcagctacagtgag

SEQ ID NO: 2744 - DNA, 25 bp, synthetic construct
  source 1..25: mol_type = other DNA; mol_type = other DNA
tggaagactgggcagctacagtgga

SEQ ID NO: 2745 - DNA, 25 bp, synthetic construct
  source 1..25: mol_type = other DNA; mol_type = other DNA
tagaagactaggcagctgcagtggg

SEQ ID NO: 2746 - DNA, 25 bp, synthetic construct
  source 1..25: mol_type = other DNA; mol_type = other DNA
tagaagactgagcagctgcagtggg

SEQ ID NO: 2747 - DNA, 25 bp, synthetic construct
  source 1..25: mol_type = other DNA; mol_type = other DNA
tagaagactggacagctgcagtggg

SEQ ID NO: 2748 - DNA, 25 bp, synthetic construct
  source 1..25: mol_type = other DNA; mol_type = other DNA
tagaagactgggcaactgcagtggg

SEQ ID NO: 2749 - DNA, 25 bp, synthetic construct
  source 1..25: mol_type = other DNA; mol_type = other DNA
tagaagactgggcagctacagtggg

SEQ ID NO: 2750 - DNA, 25 bp, synthetic construct
  source 1..25: mol_type = other DNA; mol_type = other DNA
tagaagactgggcagctgcaatggg

SEQ ID NO: 2751 - DNA, 25 bp, synthetic construct
  source 1..25: mol_type = other DNA; mol_type = other DNA
tagaagactgggcagctgcagtagg

SEQ ID NO: 2752 - DNA, 25 bp, synthetic construct
  source 1..25: mol_type = other DNA; mol_type = other DNA
tagaagactgggcagctgcagtgag

SEQ ID NO: 2753 - DNA, 25 bp, synthetic construct
  source 1..25: mol_type = other DNA; mol_type = other DNA
tagaagactgggcagctgcagtgga

SEQ ID NO: 2754 - DNA, 25 bp, synthetic construct
  source 1..25: mol_type = other DNA; mol_type = other DNA
tggaagactgggcagctgcaatagg

SEQ ID NO: 2755 - DNA, 25 bp, synthetic construct
  source 1..25: mol_type = other DNA; mol_type = other DNA
tggaagactgggcagctgcaatgag

SEQ ID NO: 2756 - DNA, 25 bp, synthetic construct
  source 1..25: mol_type = other DNA; mol_type = other DNA
tggaagactgggcagctgcaatgga

SEQ ID NO: 2757 - DNA, 25 bp, synthetic construct
  source 1..25: mol_type = other DNA; mol_type = other DNA
tggaagactgggcagctgcagtaag

SEQ ID NO: 2758 - DNA, 25 bp, synthetic construct
  source 1..25: mol_type = other DNA; mol_type = other DNA
tggaagactgggcagctgcagtaga

SEQ ID NO: 2759 - DNA, 25 bp, synthetic construct
  source 1..25: mol_type = other DNA; mol_type = other DNA
tggaagactgggcagctgcagtgaa

SEQ ID NO: 2760 - DNA, 25 bp, synthetic construct
  source 1..25: mol_type = other DNA; mol_type = other DNA
tgaaagactaggcagctgcagtggg

SEQ ID NO: 2761 - DNA, 25 bp, synthetic construct
  source 1..25: mol_type = other DNA; mol_type = other DNA
tgaaagactgagcagctgcagtggg

SEQ ID NO: 2762 - DNA, 25 bp, synthetic construct
  source 1..25: mol_type = other DNA; mol_type = other DNA
tgaaagactggacagctgcagtggg

SEQ ID NO: 2763 - DNA, 25 bp, synthetic construct
  source 1..25: mol_type = other DNA; mol_type = other DNA
tgaaagactgggcaactgcagtggg

SEQ ID NO: 2764 - DNA, 25 bp, synthetic construct
  source 1..25: mol_type = other DNA; mol_type = other DNA
tgaaagactgggcagctacagtggg

SEQ ID NO: 2765 - DNA, 25 bp, synthetic construct
  source 1..25: mol_type = other DNA; mol_type = other DNA
tgaaagactgggcagctgcaatggg

SEQ ID NO: 2766 - DNA, 25 bp, synthetic construct
  source 1..25: mol_type = other DNA; mol_type = other DNA
tgaaagactgggcagctgcagtagg

SEQ ID NO: 2767 - DNA, 25 bp, synthetic construct
  source 1..25: mol_type = other DNA; mol_type = other DNA
tgaaagactgggcagctgcagtgag

SEQ ID NO: 2768 - DNA, 25 bp, synthetic construct
  source 1..25: mol_type = other DNA; mol_type = other DNA
tgaaagactgggcagctgcagtgga

SEQ ID NO: 2769 - DNA, 25 bp, synthetic construct
  source 1..25: mol_type = other DNA; mol_type = other DNA
tggaaaactaggcagctgcagtggg

SEQ ID NO: 2770 - DNA, 25 bp, synthetic construct
  source 1..25: mol_type = other DNA; mol_type = other DNA
tggaaaactgagcagctgcagtggg

SEQ ID NO: 2771 - DNA, 25 bp, synthetic construct
  source 1..25: mol_type = other DNA; mol_type = other DNA
tggaaaactggacagctgcagtggg

SEQ ID NO: 2772 - DNA, 25 bp, synthetic construct
  source 1..25: mol_type = other DNA; mol_type = other DNA
tggaaaactgggcaactgcagtggg

SEQ ID NO: 2773 - DNA, 25 bp, synthetic construct
  source 1..25: mol_type = other DNA; mol_type = other DNA
tggaaaactgggcagctacagtggg

SEQ ID NO: 2774 - DNA, 25 bp, synthetic construct
  source 1..25: mol_type = other DNA; mol_type = other DNA
tggaaaactgggcagctgcaatggg

SEQ ID NO: 2775 - DNA, 25 bp, synthetic construct
  source 1..25: mol_type = other DNA; mol_type = other DNA
tggaaaactgggcagctgcagtagg

SEQ ID NO: 2776 - DNA, 25 bp, synthetic construct
  source 1..25: mol_type = other DNA; mol_type = other DNA
tggaaaactgggcagctgcagtgag

SEQ ID NO: 2777 - DNA, 25 bp, synthetic construct
  source 1..25: mol_type = other DNA; mol_type = other DNA
tggaaaactgggcagctgcagtgga

SEQ ID NO: 2778 - DNA, 25 bp, synthetic construct
  source 1..25: mol_type = other DNA; mol_type = other DNA
tggaagactgggcagctgcagtgga

SEQ ID NO: 2779 - DNA, 25 bp, synthetic construct
  source 1..25: mol_type = other DNA; mol_type = other DNA
atggaagacttggcagctgcagtgg

SEQ ID NO: 2780 - DNA, 25 bp, synthetic construct
  source 1..25: mol_type = other DNA; mol_type = other DNA
atggaagactgtgcagctgcagtgg

SEQ ID NO: 2781 - DNA, 25 bp, synthetic construct
  source 1..25: mol_type = other DNA; mol_type = other DNA
atggaagactggtcagctgcagtgg

SEQ ID NO: 2782 - DNA, 25 bp, synthetic construct
  source 1..25: mol_type = other DNA; mol_type = other DNA
atggaagactgggtagctgcagtgg

SEQ ID NO: 2783 - DNA, 25 bp, synthetic construct
  source 1..25: mol_type = other DNA; mol_type = other DNA
atggaagactgggcatctgcagtgg

SEQ ID NO: 2784 - DNA, 25 bp, synthetic construct
  source 1..25: mol_type = other DNA; mol_type = other DNA
atggaagactgggcagttgcagtgg

SEQ ID NO: 2785 - DNA, 25 bp, synthetic construct
  source 1..25: mol_type = other DNA; mol_type = other DNA
atggaagactgggcagcttcagtgg

SEQ ID NO: 2786 - DNA, 25 bp, synthetic construct
  source 1..25: mol_type = other DNA; mol_type = other DNA
atggaagactgggcagctgtagtgg

SEQ ID NO: 2787 - DNA, 25 bp, synthetic construct
  source 1..25: mol_type = other DNA; mol_type = other DNA
atggaagactgggcagctgcattgg

SEQ ID NO: 2788 - DNA, 25 bp, synthetic construct
  source 1..25: mol_type = other DNA; mol_type = other DNA
atggaagactgggcagctgcagttg

SEQ ID NO: 2789 - DNA, 25 bp, synthetic construct
  source 1..25: mol_type = other DNA; mol_type = other DNA
attgaagactgggcagctgcagtgg

SEQ ID NO: 2790 - DNA, 25 bp, synthetic construct
  source 1..25: mol_type = other DNA; mol_type = other DNA
atgtaagactgggcagctgcagtgg

SEQ ID NO: 2791 - DNA, 25 bp, synthetic construct
  source 1..25: mol_type = other DNA; mol_type = other DNA
atggaatactgggcagctgcagtgg

SEQ ID NO: 2792 - DNA, 25 bp, synthetic construct
  source 1..25: mol_type = other DNA; mol_type = other DNA
atggaagattgggcagctgcagtgg

SEQ ID NO: 2793 - DNA, 25 bp, synthetic construct
  source 1..25: mol_type = other DNA; mol_type = other DNA
atggaagactaagcagctgcagtgg

SEQ ID NO: 2794 - DNA, 25 bp, synthetic construct
  source 1..25: mol_type = other DNA; mol_type = other DNA
atggaagactagacagctgcagtgg

SEQ ID NO: 2795 - DNA, 25 bp, synthetic construct
  source 1..25: mol_type = other DNA; mol_type = other DNA
atggaagactaggcaactgcagtgg

SEQ ID NO: 2796 - DNA, 25 bp, synthetic construct
  source 1..25: mol_type = other DNA; mol_type = other DNA
atggaagactaggcagctacagtgg

SEQ ID NO: 2797 - DNA, 25 bp, synthetic construct
  source 1..25: mol_type = other DNA; mol_type = other DNA
atggaagactaggcagctgcaatgg

SEQ ID NO: 2798 - DNA, 25 bp, synthetic construct
  source 1..25: mol_type = other DNA; mol_type = other DNA
atggaagactaggcagctgcagtag

SEQ ID NO: 2799 - DNA, 25 bp, synthetic construct
  source 1..25: mol_type = other DNA; mol_type = other DNA
atggaagactaggcagctgcagtga

SEQ ID NO: 2800 - DNA, 25 bp, synthetic construct
  source 1..25: mol_type = other DNA; mol_type = other DNA
atggaagactgaacagctgcagtgg

SEQ ID NO: 2801 - DNA, 25 bp, synthetic construct
  source 1..25: mol_type = other DNA; mol_type = other DNA
atggaagactgagcaactgcagtgg

SEQ ID NO: 2802 - DNA, 25 bp, synthetic construct
  source 1..25: mol_type = other DNA; mol_type = other DNA
atggaagactgagcagctacagtgg

SEQ ID NO: 2803 - DNA, 25 bp, synthetic construct
  source 1..25: mol_type = other DNA; mol_type = other DNA
atggaagactgagcagctgcaatgg

SEQ ID NO: 2804 - DNA, 25 bp, synthetic construct
  source 1..25: mol_type = other DNA; mol_type = other DNA
atggaagactgagcagctgcagtag

SEQ ID NO: 2805 - DNA, 25 bp, synthetic construct
  source 1..25: mol_type = other DNA; mol_type = other DNA
atggaagactgagcagctgcagtga

SEQ ID NO: 2806 - DNA, 25 bp, synthetic construct
  source 1..25: mol_type = other DNA; mol_type = other DNA
atggaagactggacaactgcagtgg

SEQ ID NO: 2807 - DNA, 25 bp, synthetic construct
  source 1..25: mol_type = other DNA; mol_type = other DNA
atggaagactggacagctacagtgg

SEQ ID NO: 2808 - DNA, 25 bp, synthetic construct
  source 1..25: mol_type = other DNA; mol_type = other DNA
atggaagactggacagctgcaatgg

SEQ ID NO: 2809 - DNA, 25 bp, synthetic construct
  source 1..25: mol_type = other DNA; mol_type = other DNA
atggaagactggacagctgcagtag

SEQ ID NO: 2810 - DNA, 25 bp, synthetic construct
  source 1..25: mol_type = other DNA; mol_type = other DNA
atggaagactggacagctgcagtga

SEQ ID NO: 2811 - DNA, 25 bp, synthetic construct
  source 1..25: mol_type = other DNA; mol_type = other DNA
atggaagactgggcaactacagtgg

SEQ ID NO: 2812 - DNA, 25 bp, synthetic construct
  source 1..25: mol_type = other DNA; mol_type = other DNA
atggaagactgggcaactgcaatgg

SEQ ID NO: 2813 - DNA, 25 bp, synthetic construct
  source 1..25: mol_type = other DNA; mol_type = other DNA
atggaagactgggcaactgcagtag

SEQ ID NO: 2814 - DNA, 25 bp, synthetic construct
  source 1..25: mol_type = other DNA; mol_type = other DNA
atggaagactgggcaactgcagtga

SEQ ID NO: 2815 - DNA, 25 bp, synthetic construct
  source 1..25: mol_type = other DNA; mol_type = other DNA
atggaagactgggcagctacaatgg

SEQ ID NO: 2816 - DNA, 25 bp, synthetic construct
  source 1..25: mol_type = other DNA; mol_type = other DNA
atggaagactgggcagctacagtag

SEQ ID NO: 2817 - DNA, 25 bp, synthetic construct
  source 1..25: mol_type = other DNA; mol_type = other DNA
atggaagactgggcagctacagtga

SEQ ID NO: 2818 - DNA, 25 bp, synthetic construct
  source 1..25: mol_type = other DNA; mol_type = other DNA
atggaagactgggcagctgcaatag

SEQ ID NO: 2819 - DNA, 25 bp, synthetic construct
  source 1..25: mol_type = other DNA; mol_type = other DNA
atggaagactgggcagctgcaatga

SEQ ID NO: 2820 - DNA, 25 bp, synthetic construct
  source 1..25: mol_type = other DNA; mol_type = other DNA
atggaagactgggcagctgcagtaa

SEQ ID NO: 2821 - DNA, 25 bp, synthetic construct
  source 1..25: mol_type = other DNA; mol_type = other DNA
atagaagactaggcagctgcagtgg

SEQ ID NO: 2822 - DNA, 25 bp, synthetic construct
  source 1..25: mol_type = other DNA; mol_type = other DNA
atagaagactgagcagctgcagtgg

SEQ ID NO: 2823 - DNA, 25 bp, synthetic construct
  source 1..25: mol_type = other DNA; mol_type = other DNA
atagaagactggacagctgcagtgg

SEQ ID NO: 2824 - DNA, 25 bp, synthetic construct
  source 1..25: mol_type = other DNA; mol_type = other DNA
atagaagactgggcaactgcagtgg

SEQ ID NO: 2825 - DNA, 25 bp, synthetic construct
  source 1..25: mol_type = other DNA; mol_type = other DNA
atagaagactgggcagctacagtgg

SEQ ID NO: 2826 - DNA, 25 bp, synthetic construct
  source 1..25: mol_type = other DNA; mol_type = other DNA
atagaagactgggcagctgcaatgg

SEQ ID NO: 2827 - DNA, 25 bp, synthetic construct
  source 1..25: mol_type = other DNA; mol_type = other DNA
atagaagactgggcagctgcagtag

SEQ ID NO: 2828 - DNA, 25 bp, synthetic construct
  source 1..25: mol_type = other DNA; mol_type = other DNA
atagaagactgggcagctgcagtga

SEQ ID NO: 2829 - DNA, 25 bp, synthetic construct
  source 1..25: mol_type = other DNA; mol_type = other DNA
atgaaagactaggcagctgcagtgg

SEQ ID NO: 2830 - DNA, 25 bp, synthetic construct
  source 1..25: mol_type = other DNA; mol_type = other DNA
atgaaagactgagcagctgcagtgg

SEQ ID NO: 2831 - DNA, 25 bp, synthetic construct
  source 1..25: mol_type = other DNA; mol_type = other DNA
atgaaagactggacagctgcagtgg

SEQ ID NO: 2832 - DNA, 25 bp, synthetic construct
  source 1..25: mol_type = other DNA; mol_type = other DNA
atgaaagactgggcaactgcagtgg

SEQ ID NO: 2833 - DNA, 25 bp, synthetic construct
  source 1..25: mol_type = other DNA; mol_type = other DNA
atgaaagactgggcagctacagtgg

SEQ ID NO: 2834 - DNA, 25 bp, synthetic construct
  source 1..25: mol_type = other DNA; mol_type = other DNA
atgaaagactgggcagctgcaatgg

SEQ ID NO: 2835 - DNA, 25 bp, synthetic construct
  source 1..25: mol_type = other DNA; mol_type = other DNA
atgaaagactgggcagctgcagtag

SEQ ID NO: 2836 - DNA, 25 bp, synthetic construct
  source 1..25: mol_type = other DNA; mol_type = other DNA
atgaaagactgggcagctgcagtga

SEQ ID NO: 2837 - DNA, 25 bp, synthetic construct
  source 1..25: mol_type = other DNA; mol_type = other DNA
atggaaaactaggcagctgcagtgg

SEQ ID NO: 2838 - DNA, 25 bp, synthetic construct
  source 1..25: mol_type = other DNA; mol_type = other DNA
atggaaaactgagcagctgcagtgg

SEQ ID NO: 2839 - DNA, 25 bp, synthetic construct
  source 1..25: mol_type = other DNA; mol_type = other DNA
atggaaaactggacagctgcagtgg

SEQ ID NO: 2840 - DNA, 25 bp, synthetic construct
  source 1..25: mol_type = other DNA; mol_type = other DNA
atggaaaactgggcaactgcagtgg

SEQ ID NO: 2841 - DNA, 25 bp, synthetic construct
  source 1..25: mol_type = other DNA; mol_type = other DNA
atggaaaactgggcagctacagtgg

SEQ ID NO: 2842 - DNA, 25 bp, synthetic construct
  source 1..25: mol_type = other DNA; mol_type = other DNA
atggaaaactgggcagctgcaatgg

SEQ ID NO: 2843 - DNA, 25 bp, synthetic construct
  source 1..25: mol_type = other DNA; mol_type = other DNA
atggaaaactgggcagctgcagtag

SEQ ID NO: 2844 - DNA, 25 bp, synthetic construct
  source 1..25: mol_type = other DNA; mol_type = other DNA
atggaaaactgggcagctgcagtga

SEQ ID NO: 2845 - DNA, 25 bp, synthetic construct
  source 1..25: mol_type = other DNA; mol_type = other DNA
atggaagactgggcagctgcagtga

SEQ ID NO: 2846 - DNA, 25 bp, synthetic construct
  source 1..25: mol_type = other DNA; mol_type = other DNA
tatggaagactgggcagctgcagtg

SEQ ID NO: 2847 - DNA, 25 bp, synthetic construct
  source 1..25: mol_type = other DNA; mol_type = other DNA
gatggaagattgggcagctgcagtg

SEQ ID NO: 2848 - DNA, 25 bp, synthetic construct
  source 1..25: mol_type = other DNA; mol_type = other DNA
gatggaagacttggcagctgcagtg

SEQ ID NO: 2849 - DNA, 25 bp, synthetic construct
  source 1..25: mol_type = other DNA; mol_type = other DNA
gatggaagactgtgcagctgcagtg

SEQ ID NO: 2850 - DNA, 25 bp, synthetic construct
  source 1..25: mol_type = other DNA; mol_type = other DNA
gatggaagactggtcagctgcagtg

SEQ ID NO: 2851 - DNA, 25 bp, synthetic construct
  source 1..25: mol_type = other DNA; mol_type = other DNA
gatggaagactgggtagctgcagtg

SEQ ID NO: 2852 - DNA, 25 bp, synthetic construct
  source 1..25: mol_type = other DNA; mol_type = other DNA
gatggaagactgggcatctgcagtg

SEQ ID NO: 2853 - DNA, 25 bp, synthetic construct
  source 1..25: mol_type = other DNA; mol_type = other DNA
gatggaagactgggcagttgcagtg

SEQ ID NO: 2854 - DNA, 25 bp, synthetic construct
  source 1..25: mol_type = other DNA; mol_type = other DNA
gatggaagactgggcagcttcagtg

SEQ ID NO: 2855 - DNA, 25 bp, synthetic construct
  source 1..25: mol_type = other DNA; mol_type = other DNA
gatggaagactgggcagctgtagtg

SEQ ID NO: 2856 - DNA, 25 bp, synthetic construct
  source 1..25: mol_type = other DNA; mol_type = other DNA
gatggaagactgggcagctgcattg

SEQ ID NO: 2857 - DNA, 25 bp, synthetic construct
  source 1..25: mol_type = other DNA; mol_type = other DNA
gattgaagactgggcagctgcagtg

SEQ ID NO: 2858 - DNA, 25 bp, synthetic construct
  source 1..25: mol_type = other DNA; mol_type = other DNA
gatgtaagactgggcagctgcagtg

SEQ ID NO: 2859 - DNA, 25 bp, synthetic construct
  source 1..25: mol_type = other DNA; mol_type = other DNA
gatggaatactgggcagctgcagtg

SEQ ID NO: 2860 - DNA, 25 bp, synthetic construct
  source 1..25: mol_type = other DNA; mol_type = other DNA
aatggaagactaggcagctgcagtg

SEQ ID NO: 2861 - DNA, 25 bp, synthetic construct
  source 1..25: mol_type = other DNA; mol_type = other DNA
aatggaagactgagcagctgcagtg

SEQ ID NO: 2862 - DNA, 25 bp, synthetic construct
  source 1..25: mol_type = other DNA; mol_type = other DNA
aatggaagactggacagctgcagtg

SEQ ID NO: 2863 - DNA, 25 bp, synthetic construct
  source 1..25: mol_type = other DNA; mol_type = other DNA
aatggaagactgggcaactgcagtg

SEQ ID NO: 2864 - DNA, 25 bp, synthetic construct
  source 1..25: mol_type = other DNA; mol_type = other DNA
aatggaagactgggcagctacagtg

SEQ ID NO: 2865 - DNA, 25 bp, synthetic construct
  source 1..25: mol_type = other DNA; mol_type = other DNA
aatggaagactgggcagctgcaatg

SEQ ID NO: 2866 - DNA, 25 bp, synthetic construct
  source 1..25: mol_type = other DNA; mol_type = other DNA
aatggaagactgggcagctgcagta

SEQ ID NO: 2867 - DNA, 25 bp, synthetic construct
  source 1..25: mol_type = other DNA; mol_type = other DNA
aatagaagactgggcagctgcagtg

SEQ ID NO: 2868 - DNA, 25 bp, synthetic construct
  source 1..25: mol_type = other DNA; mol_type = other DNA
aatgaaagactgggcagctgcagtg

SEQ ID NO: 2869 - DNA, 25 bp, synthetic construct
  source 1..25: mol_type = other DNA; mol_type = other DNA
aatggaaaactgggcagctgcagtg

SEQ ID NO: 2870 - DNA, 25 bp, synthetic construct
  source 1..25: mol_type = other DNA; mol_type = other DNA
gatggaagactaagcagctgcagtg

SEQ ID NO: 2871 - DNA, 25 bp, synthetic construct
  source 1..25: mol_type = other DNA; mol_type = other DNA
gatggaagactagacagctgcagtg

SEQ ID NO: 2872 - DNA, 25 bp, synthetic construct
  source 1..25: mol_type = other DNA; mol_type = other DNA
gatggaagactaggcaactgcagtg

SEQ ID NO: 2873 - DNA, 25 bp, synthetic construct
  source 1..25: mol_type = other DNA; mol_type = other DNA
gatggaagactaggcagctacagtg

SEQ ID NO: 2874 - DNA, 25 bp, synthetic construct
  source 1..25: mol_type = other DNA; mol_type = other DNA
gatggaagactaggcagctgcaatg

SEQ ID NO: 2875 - DNA, 25 bp, synthetic construct
  source 1..25: mol_type = other DNA; mol_type = other DNA
gatggaagactaggcagctgcagta

SEQ ID NO: 2876 - DNA, 25 bp, synthetic construct
  source 1..25: mol_type = other DNA; mol_type = other DNA
gatggaagactgaacagctgcagtg

SEQ ID NO: 2877 - DNA, 25 bp, synthetic construct
  source 1..25: mol_type = other DNA; mol_type = other DNA
gatggaagactgagcaactgcagtg

SEQ ID NO: 2878 - DNA, 25 bp, synthetic construct
  source 1..25: mol_type = other DNA
gatggaagactgagcagctacagtg

SEQ ID NO: 2879 - DNA, 25 bp, synthetic construct
  source 1..25: mol_type = other DNA
gatggaagactgagcagctgcaatg

SEQ ID NO: 2880 - DNA, 25 bp, synthetic construct
  source 1..25: mol_type = other DNA; mol_type = other DNA
gatggaagactgagcagctgcagta

SEQ ID NO: 2881 - DNA, 25 bp, synthetic construct
  source 1..25: mol_type = other DNA; mol_type = other DNA
gatggaagactggacaactgcagtg

SEQ ID NO: 2882 - DNA, 25 bp, synthetic construct
  source 1..25: mol_type = other DNA; mol_type = other DNA
gatggaagactggacagctacagtg

SEQ ID NO: 2883 - DNA, 25 bp, synthetic construct
  source 1..25: mol_type = other DNA; mol_type = other DNA
gatggaagactggacagctgcaatg

SEQ ID NO: 2884 - DNA, 25 bp, synthetic construct
  source 1..25: mol_type = other DNA; mol_type = other DNA
gatggaagactggacagctgcagta

SEQ ID NO: 2885 - DNA, 25 bp, synthetic construct
  source 1..25: mol_type = other DNA; mol_type = other DNA
gatggaagactgggcaactacagtg

SEQ ID NO: 2886 - DNA, 25 bp, synthetic construct
  source 1..25: mol_type = other DNA; mol_type = other DNA
gatggaagactgggcaactgcaatg

SEQ ID NO: 2887 - DNA, 25 bp, synthetic construct
  source 1..25: mol_type = other DNA; mol_type = other DNA
gatggaagactgggcaactgcagta

SEQ ID NO: 2888 - DNA, 25 bp, synthetic construct
  source 1..25: mol_type = other DNA; mol_type = other DNA
gatggaagactgggcagctacaatg

SEQ ID NO: 2889 - DNA, 25 bp, synthetic construct
  source 1..25: mol_type = other DNA; mol_type = other DNA
gatggaagactgggcagctacagta

SEQ ID NO: 2890 - DNA, 25 bp, synthetic construct
  source 1..25: mol_type = other DNA; mol_type = other DNA
gatggaagactgggcagctgcaata

SEQ ID NO: 2891 - DNA, 25 bp, synthetic construct
  source 1..25: mol_type = other DNA; mol_type = other DNA
gatagaagactaggcagctgcagtg

SEQ ID NO: 2892 - DNA, 25 bp, synthetic construct
  source 1..25: mol_type = other DNA; mol_type = other DNA
gatagaagactgagcagctgcagtg

SEQ ID NO: 2893 - DNA, 25 bp, synthetic construct
  source 1..25: mol_type = other DNA; mol_type = other DNA
gatagaagactggacagctgcagtg

SEQ ID NO: 2894 - DNA, 25 bp, synthetic construct
  source 1..25: mol_type = other DNA; mol_type = other DNA
gatagaagactgggcaactgcagtg

SEQ ID NO: 2895 - DNA, 25 bp, synthetic construct
  source 1..25: mol_type = other DNA; mol_type = other DNA
gatagaagactgggcagctacagtg

SEQ ID NO: 2896 - DNA, 25 bp, synthetic construct
  source 1..25: mol_type = other DNA; mol_type = other DNA
gatagaagactgggcagctgcaatg

SEQ ID NO: 2897 - DNA, 25 bp, synthetic construct
  source 1..25: mol_type = other DNA; mol_type = other DNA
gatagaagactgggcagctgcagta

SEQ ID NO: 2898 - DNA, 25 bp, synthetic construct
  source 1..25: mol_type = other DNA; mol_type = other DNA
gatgaaagactaggcagctgcagtg

SEQ ID NO: 2899 - DNA, 25 bp, synthetic construct
  source 1..25: mol_type = other DNA; mol_type = other DNA
gatgaaagactgagcagctgcagtg

SEQ ID NO: 2900 - DNA, 25 bp, synthetic construct
  source 1..25: mol_type = other DNA; mol_type = other DNA
gatgaaagactggacagctgcagtg

SEQ ID NO: 2901 - DNA, 25 bp, synthetic construct
  source 1..25: mol_type = other DNA; mol_type = other DNA
gatgaaagactgggcaactgcagtg

SEQ ID NO: 2902 - DNA, 25 bp, synthetic construct
  source 1..25: mol_type = other DNA; mol_type = other DNA
gatgaaagactgggcagctacagtg

SEQ ID NO: 2903 - DNA, 25 bp, synthetic construct
  source 1..25: mol_type = other DNA; mol_type = other DNA
gatgaaagactgggcagctgcaatg

SEQ ID NO: 2904 - DNA, 25 bp, synthetic construct
  source 1..25: mol_type = other DNA; mol_type = other DNA
gatgaaagactgggcagctgcagta

SEQ ID NO: 2905 - DNA, 25 bp, synthetic construct
  source 1..25: mol_type = other DNA; mol_type = other DNA
gatggaaaactaggcagctgcagtg

SEQ ID NO: 2906 - DNA, 25 bp, synthetic construct
  source 1..25: mol_type = other DNA; mol_type = other DNA
gatggaaaactgagcagctgcagtg

SEQ ID NO: 2907 - DNA, 25 bp, synthetic construct
  source 1..25: mol_type = other DNA; mol_type = other DNA
gatggaaaactggacagctgcagtg

SEQ ID NO: 2908 - DNA, 25 bp, synthetic construct
  source 1..25: mol_type = other DNA; mol_type = other DNA
gatggaaaactgggcaactgcagtg

SEQ ID NO: 2909 - DNA, 25 bp, synthetic construct
  source 1..25: mol_type = other DNA; mol_type = other DNA
gatggaaaactgggcagctacagtg

SEQ ID NO: 2910 - DNA, 25 bp, synthetic construct
  source 1..25: mol_type = other DNA; mol_type = other DNA
gatggaaaactgggcagctgcaatg

SEQ ID NO: 2911 - DNA, 25 bp, synthetic construct
  source 1..25: mol_type = other DNA; mol_type = other DNA
gatggaaaactgggcagctgcagta

SEQ ID NO: 2912 - DNA, 25 bp, synthetic construct
  source 1..25: mol_type = other DNA; mol_type = other DNA
gatggaagactgggcagctgcagta

SEQ ID NO: 2913 - DNA, 25 bp, synthetic construct
  source 1..25: mol_type = other DNA; mol_type = other DNA
agatggaagactgggcagctgcagt

SEQ ID NO: 2914 - DNA, 25 bp, synthetic construct
  source 1..25: mol_type = other DNA; mol_type = other DNA
agatggaagattgggcagctgcagt

SEQ ID NO: 2915 - DNA, 25 bp, synthetic construct
  source 1..25: mol_type = other DNA; mol_type = other DNA
agatggaagacttggcagctgcagt

SEQ ID NO: 2916 - DNA, 25 bp, synthetic construct
  source 1..25: mol_type = other DNA; mol_type = other DNA
agatggaagactgtgcagctgcagt

SEQ ID NO: 2917 - DNA, 25 bp, synthetic construct
  source 1..25: mol_type = other DNA; mol_type = other DNA
agatggaagactggtcagctgcagt

SEQ ID NO: 2918 - DNA, 25 bp, synthetic construct
  source 1..25: mol_type = other DNA; mol_type = other DNA
agatggaagactgggtagctgcagt

SEQ ID NO: 2919 - DNA, 25 bp, synthetic construct
  source 1..25: mol_type = other DNA; mol_type = other DNA
agatggaagactgggcatctgcagt

SEQ ID NO: 2920 - DNA, 25 bp, synthetic construct
  source 1..25: mol_type = other DNA; mol_type = other DNA
agatggaagactgggcagttgcagt

SEQ ID NO: 2921 - DNA, 25 bp, synthetic construct
  source 1..25: mol_type = other DNA; mol_type = other DNA
atatggaagactgggcagctgcagt

SEQ ID NO: 2922 - DNA, 25 bp, synthetic construct
  source 1..25: mol_type = other DNA; mol_type = other DNA
agatggaagactgggcagcttcagt

SEQ ID NO: 2923 - DNA, 25 bp, synthetic construct
  source 1..25: mol_type = other DNA; mol_type = other DNA
agatggaagactgggcagctgtagt

SEQ ID NO: 2924 - DNA, 25 bp, synthetic construct
  source 1..25: mol_type = other DNA; mol_type = other DNA
agatggaagactgggcagctgcatt

SEQ ID NO: 2925 - DNA, 25 bp, synthetic construct
  source 1..25: mol_type = other DNA; mol_type = other DNA
agattgaagactgggcagctgcagt

SEQ ID NO: 2926 - DNA, 25 bp, synthetic construct
  source 1..25: mol_type = other DNA; mol_type = other DNA
agatgtaagactgggcagctgcagt

SEQ ID NO: 2927 - DNA, 25 bp, synthetic construct
  source 1..25: mol_type = other DNA; mol_type = other DNA
agatggaatactgggcagctgcagt

SEQ ID NO: 2928 - DNA, 25 bp, synthetic construct
  source 1..25: mol_type = other DNA; mol_type = other DNA
agatggaagactaagcagctgcagt

SEQ ID NO: 2929 - DNA, 25 bp, synthetic construct
  source 1..25: mol_type = other DNA; mol_type = other DNA
agatggaagactagacagctgcagt

SEQ ID NO: 2930 - DNA, 25 bp, synthetic construct
  source 1..25: mol_type = other DNA; mol_type = other DNA
agatggaagactaggcaactgcagt

SEQ ID NO: 2931 - DNA, 25 bp, synthetic construct
  source 1..25: mol_type = other DNA; mol_type = other DNA
agatggaagactaggcagctacagt

SEQ ID NO: 2932 - DNA, 25 bp, synthetic construct
  source 1..25: mol_type = other DNA; mol_type = other DNA
agatggaagactaggcagctgcaat

SEQ ID NO: 2933 - DNA, 25 bp, synthetic construct
  source 1..25: mol_type = other DNA; mol_type = other DNA
agatggaagactgaacagctgcagt

SEQ ID NO: 2934 - DNA, 25 bp, synthetic construct
  source 1..25: mol_type = other DNA; mol_type = other DNA
agatggaagactgagcaactgcagt

SEQ ID NO: 2935 - DNA, 25 bp, synthetic construct
  source 1..25: mol_type = other DNA; mol_type = other DNA
agatggaagactgagcagctacagt

SEQ ID NO: 2936 - DNA, 25 bp, synthetic construct
  source 1..25: mol_type = other DNA; mol_type = other DNA
agatggaagactgagcagctgcaat

SEQ ID NO: 2937 - DNA, 25 bp, synthetic construct
  source 1..25: mol_type = other DNA; mol_type = other DNA
agatggaagactggacaactgcagt

SEQ ID NO: 2938 - DNA, 25 bp, synthetic construct
  source 1..25: mol_type = other DNA; mol_type = other DNA
agatggaagactggacagctacagt

SEQ ID NO: 2939 - DNA, 25 bp, synthetic construct
  source 1..25: mol_type = other DNA; mol_type = other DNA
agatggaagactggacagctgcaat

SEQ ID NO: 2940 - DNA, 25 bp, synthetic construct
  source 1..25: mol_type = other DNA; mol_type = other DNA
agatggaagactgggcaactacagt

SEQ ID NO: 2941 - DNA, 25 bp, synthetic construct
  source 1..25: mol_type = other DNA; mol_type = other DNA
agatggaagactgggcaactgcaat

SEQ ID NO: 2942 - DNA, 25 bp, synthetic construct
  source 1..25: mol_type = other DNA; mol_type = other DNA
aaatggaagactaggcagctgcagt

SEQ ID NO: 2943 - DNA, 25 bp, synthetic construct
  source 1..25: mol_type = other DNA; mol_type = other DNA
aaatggaagactgagcagctgcagt

SEQ ID NO: 2944 - DNA, 25 bp, synthetic construct
  source 1..25: mol_type = other DNA; mol_type = other DNA
aaatggaagactggacagctgcagt

SEQ ID NO: 2945 - DNA, 25 bp, synthetic construct
  source 1..25: mol_type = other DNA; mol_type = other DNA
aaatggaagactgggcaactgcagt

SEQ ID NO: 2946 - DNA, 25 bp, synthetic construct
  source 1..25: mol_type = other DNA; mol_type = other DNA
aaatggaagactgggcagctacagt

SEQ ID NO: 2947 - DNA, 25 bp, synthetic construct
  source 1..25: mol_type = other DNA; mol_type = other DNA
aaatggaagactgggcagctgcaat

SEQ ID NO: 2948 - DNA, 25 bp, synthetic construct
  source 1..25: mol_type = other DNA; mol_type = other DNA
aaatagaagactgggcagctgcagt

SEQ ID NO: 2949 - DNA, 25 bp, synthetic construct
  source 1..25: mol_type = other DNA; mol_type = other DNA
aaatgaaagactgggcagctgcagt

SEQ ID NO: 2950 - DNA, 25 bp, synthetic construct
  source 1..25: mol_type = other DNA; mol_type = other DNA
aaatggaaaactgggcagctgcagt

SEQ ID NO: 2951 - DNA, 25 bp, synthetic construct
  source 1..25: mol_type = other DNA; mol_type = other DNA
agatggaagactgggcagctacaat

SEQ ID NO: 2952 - DNA, 25 bp, synthetic construct
  source 1..25: mol_type = other DNA; mol_type = other DNA
agatagaagactaggcagctgcagt

SEQ ID NO: 2953 - DNA, 25 bp, synthetic construct
  source 1..25: mol_type = other DNA; mol_type = other DNA
agatagaagactgagcagctgcagt

SEQ ID NO: 2954 - DNA, 25 bp, synthetic construct
  source 1..25: mol_type = other DNA; mol_type = other DNA
agatagaagactggacagctgcagt

SEQ ID NO: 2955 - DNA, 25 bp, synthetic construct
  source 1..25: mol_type = other DNA; mol_type = other DNA
agatagaagactgggcaactgcagt

SEQ ID NO: 2956 - DNA, 25 bp, synthetic construct
  source 1..25: mol_type = other DNA; mol_type = other DNA
agatagaagactgggcagctacagt

SEQ ID NO: 2957 - DNA, 25 bp, synthetic construct
  source 1..25: mol_type = other DNA; mol_type = other DNA
agatagaagactgggcagctgcaat

SEQ ID NO: 2958 - DNA, 25 bp, synthetic construct
  source 1..25: mol_type = other DNA; mol_type = other DNA
agatgaaagactaggcagctgcagt

SEQ ID NO: 2959 - DNA, 25 bp, synthetic construct
  source 1..25: mol_type = other DNA; mol_type = other DNA
agatgaaagactgagcagctgcagt

SEQ ID NO: 2960 - DNA, 25 bp, synthetic construct
  source 1..25: mol_type = other DNA; mol_type = other DNA
agatgaaagactggacagctgcagt

SEQ ID NO: 2961 - DNA, 25 bp, synthetic construct
  source 1..25: mol_type = other DNA; mol_type = other DNA
agatgaaagactgggcaactgcagt

SEQ ID NO: 2962 - DNA, 25 bp, synthetic construct
  source 1..25: mol_type = other DNA; mol_type = other DNA
agatgaaagactgggcagctacagt

SEQ ID NO: 2963 - DNA, 25 bp, synthetic construct
  source 1..25: mol_type = other DNA; mol_type = other DNA
agatgaaagactgggcagctgcaat

SEQ ID NO: 2964 - DNA, 25 bp, synthetic construct
  source 1..25: mol_type = other DNA; mol_type = other DNA
agatggaaaactaggcagctgcagt

SEQ ID NO: 2965 - DNA, 25 bp, synthetic construct
  source 1..25: mol_type = other DNA; mol_type = other DNA
agatggaaaactgagcagctgcagt

SEQ ID NO: 2966 - DNA, 25 bp, synthetic construct
  source 1..25: mol_type = other DNA; mol_type = other DNA
agatggaaaactggacagctgcagt

SEQ ID NO: 2967 - DNA, 25 bp, synthetic construct
  source 1..25: mol_type = other DNA; mol_type = other DNA
agatggaaaactgggcaactgcagt

SEQ ID NO: 2968 - DNA, 25 bp, synthetic construct
  source 1..25: mol_type = other DNA; mol_type = other DNA
agatggaaaactgggcagctacagt

SEQ ID NO: 2969 - DNA, 25 bp, synthetic construct
  source 1..25: mol_type = other DNA; mol_type = other DNA
agatggaaaactgggcagctgcaat

SEQ ID NO: 2970 - DNA, 25 bp, synthetic construct
  source 1..25: mol_type = other DNA; mol_type = other DNA
agatggaagactgggcagctgcaat

SEQ ID NO: 2971 - DNA, 25 bp, synthetic construct
  source 1..25: mol_type = other DNA; mol_type = other DNA
gagatggaagactgggcagctgcag

SEQ ID NO: 2972 - DNA, 25 bp, synthetic construct
  source 1..25: mol_type = other DNA; mol_type = other DNA
tagatggaagactgggcagctgcag

SEQ ID NO: 2973 - DNA, 25 bp, synthetic construct
  source 1..25: mol_type = other DNA; mol_type = other DNA
gagatggaatactgggcagctgcag

SEQ ID NO: 2974 - DNA, 25 bp, synthetic construct
  source 1..25: mol_type = other DNA; mol_type = other DNA
gagatggaagattgggcagctgcag

SEQ ID NO: 2975 - DNA, 25 bp, synthetic construct
  source 1..25: mol_type = other DNA; mol_type = other DNA
gagatggaagacttggcagctgcag

SEQ ID NO: 2976 - DNA, 25 bp, synthetic construct
  source 1..25: mol_type = other DNA; mol_type = other DNA
gagatggaagactgtgcagctgcag

SEQ ID NO: 2977 - DNA, 25 bp, synthetic construct
  source 1..25: mol_type = other DNA; mol_type = other DNA
gagatggaagactggtcagctgcag

SEQ ID NO: 2978 - DNA, 25 bp, synthetic construct
  source 1..25: mol_type = other DNA; mol_type = other DNA
gagatggaagactgggtagctgcag

SEQ ID NO: 2979 - DNA, 25 bp, synthetic construct
  source 1..25: mol_type = other DNA; mol_type = other DNA
gagatggaagactgggcatctgcag

SEQ ID NO: 2980 - DNA, 25 bp, synthetic construct
  source 1..25: mol_type = other DNA; mol_type = other DNA
gagatggaagactgggcagttgcag

SEQ ID NO: 2981 - DNA, 25 bp, synthetic construct
  source 1..25: mol_type = other DNA; mol_type = other DNA
gagatggaagactgggcagcttcag

SEQ ID NO: 2982 - DNA, 25 bp, synthetic construct
  source 1..25: mol_type = other DNA; mol_type = other DNA
gagatggaagactgggcagctgtag

SEQ ID NO: 2983 - DNA, 25 bp, synthetic construct
  source 1..25: mol_type = other DNA; mol_type = other DNA
gatatggaagactgggcagctgcag

SEQ ID NO: 2984 - DNA, 25 bp, synthetic construct
  source 1..25: mol_type = other DNA; mol_type = other DNA
gagattgaagactgggcagctgcag

SEQ ID NO: 2985 - DNA, 25 bp, synthetic construct
  source 1..25: mol_type = other DNA; mol_type = other DNA
gagatgtaagactgggcagctgcag

SEQ ID NO: 2986 - DNA, 25 bp, synthetic construct
  source 1..25: mol_type = other DNA; mol_type = other DNA
aagatggaaaactgggcagctgcag

SEQ ID NO: 2987 - DNA, 25 bp, synthetic construct
  source 1..25: mol_type = other DNA; mol_type = other DNA
aagatggaagactaggcagctgcag

SEQ ID NO: 2988 - DNA, 25 bp, synthetic construct
  source 1..25: mol_type = other DNA; mol_type = other DNA
aagatggaagactgagcagctgcag

SEQ ID NO: 2989 - DNA, 25 bp, synthetic construct
  source 1..25: mol_type = other DNA; mol_type = other DNA
aagatggaagactggacagctgcag

SEQ ID NO: 2990 - DNA, 25 bp, synthetic construct
  source 1..25: mol_type = other DNA; mol_type = other DNA
aagatggaagactgggcaactgcag

SEQ ID NO: 2991 - DNA, 25 bp, synthetic construct
  source 1..25: mol_type = other DNA; mol_type = other DNA
aagatggaagactgggcagctacag

SEQ ID NO: 2992 - DNA, 25 bp, synthetic construct
  source 1..25: mol_type = other DNA; mol_type = other DNA
aagatggaagactgggcagctgcaa

SEQ ID NO: 2993 - DNA, 25 bp, synthetic construct
  source 1..25: mol_type = other DNA; mol_type = other DNA
aaaatggaagactgggcagctgcag

SEQ ID NO: 2994 - DNA, 25 bp, synthetic construct
  source 1..25: mol_type = other DNA; mol_type = other DNA
aagatagaagactgggcagctgcag

SEQ ID NO: 2995 - DNA, 25 bp, synthetic construct
  source 1..25: mol_type = other DNA; mol_type = other DNA
aagatgaaagactgggcagctgcag

SEQ ID NO: 2996 - DNA, 25 bp, synthetic construct
  source 1..25: mol_type = other DNA; mol_type = other DNA
gagatggaaaactaggcagctgcag

SEQ ID NO: 2997 - DNA, 25 bp, synthetic construct
  source 1..25: mol_type = other DNA; mol_type = other DNA
gagatggaaaactgagcagctgcag

SEQ ID NO: 2998 - DNA, 25 bp, synthetic construct
  source 1..25: mol_type = other DNA; mol_type = other DNA
gagatggaaaactggacagctgcag

SEQ ID NO: 2999 - DNA, 25 bp, synthetic construct
  source 1..25: mol_type = other DNA; mol_type = other DNA
gagatggaaaactgggcaactgcag

SEQ ID NO: 3000 - DNA, 25 bp, synthetic construct
  source 1..25: mol_type = other DNA; mol_type = other DNA
gagatggaaaactgggcagctacag

SEQ ID NO: 3001 - DNA, 25 bp, synthetic construct
  source 1..25: mol_type = other DNA; mol_type = other DNA
gagatggaaaactgggcagctgcaa

SEQ ID NO: 3002 - DNA, 25 bp, synthetic construct
  source 1..25: mol_type = other DNA; mol_type = other DNA
gagatggaagactaagcagctgcag

SEQ ID NO: 3003 - DNA, 25 bp, synthetic construct
  source 1..25: mol_type = other DNA; mol_type = other DNA
gagatggaagactagacagctgcag

SEQ ID NO: 3004 - DNA, 25 bp, synthetic construct
  source 1..25: mol_type = other DNA; mol_type = other DNA
gagatggaagactaggcaactgcag

SEQ ID NO: 3005 - DNA, 25 bp, synthetic construct
  source 1..25: mol_type = other DNA; mol_type = other DNA
gagatggaagactaggcagctacag

SEQ ID NO: 3006 - DNA, 25 bp, synthetic construct
  source 1..25: mol_type = other DNA; mol_type = other DNA
gagatggaagactaggcagctgcaa

SEQ ID NO: 3007 - DNA, 25 bp, synthetic construct
  source 1..25: mol_type = other DNA; mol_type = other DNA
gagatggaagactgaacagctgcag

SEQ ID NO: 3008 - DNA, 25 bp, synthetic construct
  source 1..25: mol_type = other DNA; mol_type = other DNA
gagatggaagactgagcaactgcag

SEQ ID NO: 3009 - DNA, 25 bp, synthetic construct
  source 1..25: mol_type = other DNA; mol_type = other DNA
gagatggaagactgagcagctacag

SEQ ID NO: 3010 - DNA, 25 bp, synthetic construct
  source 1..25: mol_type = other DNA; mol_type = other DNA
gagatggaagactgagcagctgcaa

SEQ ID NO: 3011 - DNA, 25 bp, synthetic construct
  source 1..25: mol_type = other DNA; mol_type = other DNA
gagatggaagactggacaactgcag

SEQ ID NO: 3012 - DNA, 25 bp, synthetic construct
  source 1..25: mol_type = other DNA; mol_type = other DNA
gagatggaagactggacagctacag

SEQ ID NO: 3013 - DNA, 25 bp, synthetic construct
  source 1..25: mol_type = other DNA; mol_type = other DNA
gagatggaagactggacagctgcaa

SEQ ID NO: 3014 - DNA, 25 bp, synthetic construct
  source 1..25: mol_type = other DNA; mol_type = other DNA
gagatggaagactgggcaactacag

SEQ ID NO: 3015 - DNA, 25 bp, synthetic construct
  source 1..25: mol_type = other DNA; mol_type = other DNA
gagatggaagactgggcaactgcaa

SEQ ID NO: 3016 - DNA, 25 bp, synthetic construct
  source 1..25: mol_type = other DNA; mol_type = other DNA
gagatggaagactgggcagctacaa

SEQ ID NO: 3017 - DNA, 25 bp, synthetic construct
  source 1..25: mol_type = other DNA; mol_type = other DNA
gaaatggaaaactgggcagctgcag

SEQ ID NO: 3018 - DNA, 25 bp, synthetic construct
  source 1..25: mol_type = other DNA; mol_type = other DNA
gaaatggaagactaggcagctgcag

SEQ ID NO: 3019 - DNA, 25 bp, synthetic construct
  source 1..25: mol_type = other DNA; mol_type = other DNA
gaaatggaagactgagcagctgcag

SEQ ID NO: 3020 - DNA, 25 bp, synthetic construct
  source 1..25: mol_type = other DNA; mol_type = other DNA
gaaatggaagactggacagctgcag

SEQ ID NO: 3021 - DNA, 25 bp, synthetic construct
  source 1..25: mol_type = other DNA; mol_type = other DNA
gaaatggaagactgggcaactgcag

SEQ ID NO: 3022 - DNA, 25 bp, synthetic construct
  source 1..25: mol_type = other DNA; mol_type = other DNA
gaaatggaagactgggcagctacag

SEQ ID NO: 3023 - DNA, 25 bp, synthetic construct
  source 1..25: mol_type = other DNA; mol_type = other DNA
gaaatggaagactgggcagctgcaa

SEQ ID NO: 3024 - DNA, 25 bp, synthetic construct
  source 1..25: mol_type = other DNA; mol_type = other DNA
gaaatagaagactgggcagctgcag

SEQ ID NO: 3025 - DNA, 25 bp, synthetic construct
  source 1..25: mol_type = other DNA; mol_type = other DNA
gaaatgaaagactgggcagctgcag

SEQ ID NO: 3026 - DNA, 25 bp, synthetic construct
  source 1..25: mol_type = other DNA; mol_type = other DNA
gagatagaagactaggcagctgcag

SEQ ID NO: 3027 - DNA, 25 bp, synthetic construct
  source 1..25: mol_type = other DNA; mol_type = other DNA
gagatagaagactgagcagctgcag

SEQ ID NO: 3028 - DNA, 25 bp, synthetic construct
  source 1..25: mol_type = other DNA; mol_type = other DNA
gagatagaagactggacagctgcag

SEQ ID NO: 3029 - DNA, 25 bp, synthetic construct
  source 1..25: mol_type = other DNA; mol_type = other DNA
gagatagaagactgggcaactgcag

SEQ ID NO: 3030 - DNA, 25 bp, synthetic construct
  source 1..25: mol_type = other DNA; mol_type = other DNA
gagatagaagactgggcagctacag

SEQ ID NO: 3031 - DNA, 25 bp, synthetic construct
  source 1..25: mol_type = other DNA; mol_type = other DNA
gagatagaagactgggcagctgcaa

SEQ ID NO: 3032 - DNA, 25 bp, synthetic construct
  source 1..25: mol_type = other DNA; mol_type = other DNA
gagatgaaagactaggcagctgcag

SEQ ID NO: 3033 - DNA, 25 bp, synthetic construct
  source 1..25: mol_type = other DNA; mol_type = other DNA
gagatgaaagactgagcagctgcag

SEQ ID NO: 3034 - DNA, 25 bp, synthetic construct
  source 1..25: mol_type = other DNA; mol_type = other DNA
gagatgaaagactggacagctgcag

SEQ ID NO: 3035 - DNA, 25 bp, synthetic construct
  source 1..25: mol_type = other DNA; mol_type = other DNA
gagatgaaagactgggcaactgcag

SEQ ID NO: 3036 - DNA, 25 bp, synthetic construct
  source 1..25: mol_type = other DNA; mol_type = other DNA
gagatgaaagactgggcagctacag

SEQ ID NO: 3037 - DNA, 25 bp, synthetic construct
  source 1..25: mol_type = other DNA; mol_type = other DNA
gagatgaaagactgggcagctgcaa

SEQ ID NO: 3038 - DNA, 25 bp, synthetic construct
  source 1..25: mol_type = other DNA; mol_type = other DNA
gagatggaagactgggcagctgcaa

SEQ ID NO: 3039 - DNA, 25 bp, synthetic construct
  source 1..25: mol_type = other DNA; mol_type = other DNA
tgagatggaagactgggcagctgca

SEQ ID NO: 3040 - DNA, 25 bp, synthetic construct
  source 1..25: mol_type = other DNA; mol_type = other DNA
ggagatggaatactgggcagctgca

SEQ ID NO: 3041 - DNA, 25 bp, synthetic construct
  source 1..25: mol_type = other DNA; mol_type = other DNA
ggagatggaagattgggcagctgca

SEQ ID NO: 3042 - DNA, 25 bp, synthetic construct
  source 1..25: mol_type = other DNA; mol_type = other DNA
ggagatggaagacttggcagctgca

SEQ ID NO: 3043 - DNA, 25 bp, synthetic construct
  source 1..25: mol_type = other DNA; mol_type = other DNA
ggagatggaagactgtgcagctgca

SEQ ID NO: 3044 - DNA, 25 bp, synthetic construct
  source 1..25: mol_type = other DNA; mol_type = other DNA
ggagatggaagactggtcagctgca

SEQ ID NO: 3045 - DNA, 25 bp, synthetic construct
  source 1..25: mol_type = other DNA; mol_type = other DNA
ggagatggaagactgggtagctgca

SEQ ID NO: 3046 - DNA, 25 bp, synthetic construct
  source 1..25: mol_type = other DNA; mol_type = other DNA
gtagatggaagactgggcagctgca

SEQ ID NO: 3047 - DNA, 25 bp, synthetic construct
  source 1..25: mol_type = other DNA; mol_type = other DNA
ggagatggaagactgggcatctgca

SEQ ID NO: 3048 - DNA, 25 bp, synthetic construct
  source 1..25: mol_type = other DNA; mol_type = other DNA
ggagatggaagactgggcagttgca

SEQ ID NO: 3049 - DNA, 25 bp, synthetic construct
  source 1..25: mol_type = other DNA; mol_type = other DNA
ggagatggaagactgggcagcttca

SEQ ID NO: 3050 - DNA, 25 bp, synthetic construct
  source 1..25: mol_type = other DNA; mol_type = other DNA
ggagatggaagactgggcagctgta

SEQ ID NO: 3051 - DNA, 25 bp, synthetic construct
  source 1..25: mol_type = other DNA; mol_type = other DNA
ggatatggaagactgggcagctgca

SEQ ID NO: 3052 - DNA, 25 bp, synthetic construct
  source 1..25: mol_type = other DNA; mol_type = other DNA
ggagattgaagactgggcagctgca

SEQ ID NO: 3053 - DNA, 25 bp, synthetic construct
  source 1..25: mol_type = other DNA; mol_type = other DNA
ggagatgtaagactgggcagctgca

SEQ ID NO: 3054 - DNA, 25 bp, synthetic construct
  source 1..25: mol_type = other DNA; mol_type = other DNA
agagatggaaaactgggcagctgca

SEQ ID NO: 3055 - DNA, 25 bp, synthetic construct
  source 1..25: mol_type = other DNA; mol_type = other DNA
agagatggaagactaggcagctgca

SEQ ID NO: 3056 - DNA, 25 bp, synthetic construct
  source 1..25: mol_type = other DNA; mol_type = other DNA
agagatggaagactgagcagctgca

SEQ ID NO: 3057 - DNA, 25 bp, synthetic construct
  source 1..25: mol_type = other DNA; mol_type = other DNA
agagatggaagactggacagctgca

SEQ ID NO: 3058 - DNA, 25 bp, synthetic construct
  source 1..25: mol_type = other DNA; mol_type = other DNA
aaagatggaagactgggcagctgca

SEQ ID NO: 3059 - DNA, 25 bp, synthetic construct
  source 1..25: mol_type = other DNA; mol_type = other DNA
agagatggaagactgggcaactgca

SEQ ID NO: 3060 - DNA, 25 bp, synthetic construct
  source 1..25: mol_type = other DNA; mol_type = other DNA
agagatggaagactgggcagctaca

SEQ ID NO: 3061 - DNA, 25 bp, synthetic construct
  source 1..25: mol_type = other DNA; mol_type = other DNA
agaaatggaagactgggcagctgca

SEQ ID NO: 3062 - DNA, 25 bp, synthetic construct
  source 1..25: mol_type = other DNA; mol_type = other DNA
agagatagaagactgggcagctgca

SEQ ID NO: 3063 - DNA, 25 bp, synthetic construct
  source 1..25: mol_type = other DNA; mol_type = other DNA
agagatgaaagactgggcagctgca

SEQ ID NO: 3064 - DNA, 25 bp, synthetic construct
  source 1..25: mol_type = other DNA; mol_type = other DNA
ggagatggaaaactaggcagctgca

SEQ ID NO: 3065 - DNA, 25 bp, synthetic construct
  source 1..25: mol_type = other DNA; mol_type = other DNA
ggagatggaaaactgagcagctgca

SEQ ID NO: 3066 - DNA, 25 bp, synthetic construct
  source 1..25: mol_type = other DNA; mol_type = other DNA
ggagatggaaaactggacagctgca

SEQ ID NO: 3067 - DNA, 25 bp, synthetic construct
  source 1..25: mol_type = other DNA; mol_type = other DNA
ggagatggaaaactgggcaactgca

SEQ ID NO: 3068 - DNA, 25 bp, synthetic construct
  source 1..25: mol_type = other DNA; mol_type = other DNA
ggagatggaaaactgggcagctaca

SEQ ID NO: 3069 - DNA, 25 bp, synthetic construct
  source 1..25: mol_type = other DNA; mol_type = other DNA
ggagatggaagactaagcagctgca

SEQ ID NO: 3070 - DNA, 25 bp, synthetic construct
  source 1..25: mol_type = other DNA; mol_type = other DNA
ggagatggaagactagacagctgca

SEQ ID NO: 3071 - DNA, 25 bp, synthetic construct
  source 1..25: mol_type = other DNA; mol_type = other DNA
ggagatggaagactaggcaactgca

SEQ ID NO: 3072 - DNA, 25 bp, synthetic construct
  source 1..25: mol_type = other DNA; mol_type = other DNA
ggagatggaagactaggcagctaca

SEQ ID NO: 3073 - DNA, 25 bp, synthetic construct
  source 1..25: mol_type = other DNA; mol_type = other DNA
ggagatggaagactgaacagctgca

SEQ ID NO: 3074 - DNA, 25 bp, synthetic construct
  source 1..25: mol_type = other DNA; mol_type = other DNA
ggagatggaagactgagcaactgca

SEQ ID NO: 3075 - DNA, 25 bp, synthetic construct
  source 1..25: mol_type = other DNA; mol_type = other DNA
ggagatggaagactgagcagctaca

SEQ ID NO: 3076 - DNA, 25 bp, synthetic construct
  source 1..25: mol_type = other DNA; mol_type = other DNA
ggagatggaagactggacaactgca

SEQ ID NO: 3077 - DNA, 25 bp, synthetic construct
  source 1..25: mol_type = other DNA; mol_type = other DNA
ggagatggaagactggacagctaca

SEQ ID NO: 3078 - DNA, 25 bp, synthetic construct
  source 1..25: mol_type = other DNA; mol_type = other DNA
gaagatggaaaactgggcagctgca

SEQ ID NO: 3079 - DNA, 25 bp, synthetic construct
  source 1..25: mol_type = other DNA; mol_type = other DNA
gaagatggaagactaggcagctgca

SEQ ID NO: 3080 - DNA, 25 bp, synthetic construct
  source 1..25: mol_type = other DNA; mol_type = other DNA
gaagatggaagactgagcagctgca

SEQ ID NO: 3081 - DNA, 25 bp, synthetic construct
  source 1..25: mol_type = other DNA; mol_type = other DNA
gaagatggaagactggacagctgca

SEQ ID NO: 3082 - DNA, 25 bp, synthetic construct
  source 1..25: mol_type = other DNA; mol_type = other DNA
gaagatggaagactgggcaactgca

SEQ ID NO: 3083 - DNA, 25 bp, synthetic construct
  source 1..25: mol_type = other DNA; mol_type = other DNA
gaagatggaagactgggcagctaca

SEQ ID NO: 3084 - DNA, 25 bp, synthetic construct
  source 1..25: mol_type = other DNA; mol_type = other DNA
gaaaatggaagactgggcagctgca

SEQ ID NO: 3085 - DNA, 25 bp, synthetic construct
  source 1..25: mol_type = other DNA; mol_type = other DNA
gaagatagaagactgggcagctgca

SEQ ID NO: 3086 - DNA, 25 bp, synthetic construct
  source 1..25: mol_type = other DNA; mol_type = other DNA
gaagatgaaagactgggcagctgca

SEQ ID NO: 3087 - DNA, 25 bp, synthetic construct
  source 1..25: mol_type = other DNA; mol_type = other DNA
ggagatggaagactgggcaactaca

SEQ ID NO: 3088 - DNA, 25 bp, synthetic construct
  source 1..25: mol_type = other DNA; mol_type = other DNA
ggaaatggaaaactgggcagctgca

SEQ ID NO: 3089 - DNA, 25 bp, synthetic construct
  source 1..25: mol_type = other DNA; mol_type = other DNA
ggaaatggaagactaggcagctgca

SEQ ID NO: 3090 - DNA, 25 bp, synthetic construct
  source 1..25: mol_type = other DNA; mol_type = other DNA
ggaaatggaagactgagcagctgca

SEQ ID NO: 3091 - DNA, 25 bp, synthetic construct
  source 1..25: mol_type = other DNA; mol_type = other DNA
ggaaatggaagactggacagctgca

SEQ ID NO: 3092 - DNA, 25 bp, synthetic construct
  source 1..25: mol_type = other DNA; mol_type = other DNA
ggaaatggaagactgggcaactgca

SEQ ID NO: 3093 - DNA, 25 bp, synthetic construct
  source 1..25: mol_type = other DNA; mol_type = other DNA
ggaaatggaagactgggcagctaca

SEQ ID NO: 3094 - DNA, 25 bp, synthetic construct
  source 1..25: mol_type = other DNA; mol_type = other DNA
ggaaatagaagactgggcagctgca

SEQ ID NO: 3095 - DNA, 25 bp, synthetic construct
  source 1..25: mol_type = other DNA; mol_type = other DNA
ggaaatgaaagactgggcagctgca

SEQ ID NO: 3096 - DNA, 25 bp, synthetic construct
  source 1..25: mol_type = other DNA; mol_type = other DNA
ggagatagaagactaggcagctgca

SEQ ID NO: 3097 - DNA, 25 bp, synthetic construct
  source 1..25: mol_type = other DNA; mol_type = other DNA
ggagatagaagactgagcagctgca

SEQ ID NO: 3098 - DNA, 25 bp, synthetic construct
  source 1..25: mol_type = other DNA; mol_type = other DNA
ggagatagaagactggacagctgca

SEQ ID NO: 3099 - DNA, 25 bp, synthetic construct
  source 1..25: mol_type = other DNA; mol_type = other DNA
ggagatagaagactgggcaactgca

SEQ ID NO: 3100 - DNA, 25 bp, synthetic construct
  source 1..25: mol_type = other DNA; mol_type = other DNA
ggagatagaagactgggcagctaca

SEQ ID NO: 3101 - DNA, 25 bp, synthetic construct
  source 1..25: mol_type = other DNA; mol_type = other DNA
ggagatgaaagactaggcagctgca

SEQ ID NO: 3102 - DNA, 25 bp, synthetic construct
  source 1..25: mol_type = other DNA; mol_type = other DNA
ggagatgaaagactgagcagctgca

SEQ ID NO: 3103 - DNA, 25 bp, synthetic construct
  source 1..25: mol_type = other DNA; mol_type = other DNA
ggagatgaaagactggacagctgca

SEQ ID NO: 3104 - DNA, 25 bp, synthetic construct
  source 1..25: mol_type = other DNA; mol_type = other DNA
ggagatgaaagactgggcaactgca

SEQ ID NO: 3105 - DNA, 25 bp, synthetic construct
  source 1..25: mol_type = other DNA; mol_type = other DNA
ggagatgaaagactgggcagctaca

SEQ ID NO: 3106 - DNA, 25 bp, synthetic construct
  source 1..25: mol_type = other DNA; mol_type = other DNA
ggagatggaagactgggcagctaca

SEQ ID NO: 3107 - DNA, 25 bp, synthetic construct
  source 1..25: mol_type = other DNA; mol_type = other DNA
cggagatggaagactgggcagctgc

SEQ ID NO: 3108 - DNA, 25 bp, synthetic construct
  source 1..25: mol_type = other DNA; mol_type = other DNA
tggagatggaagactgggcagctgc

SEQ ID NO: 3109 - DNA, 25 bp, synthetic construct
  source 1..25: mol_type = other DNA; mol_type = other DNA
cggagatggaatactgggcagctgc

SEQ ID NO: 3110 - DNA, 25 bp, synthetic construct
  source 1..25: mol_type = other DNA; mol_type = other DNA
cggagatggaagattgggcagctgc

SEQ ID NO: 3111 - DNA, 25 bp, synthetic construct
  source 1..25: mol_type = other DNA; mol_type = other DNA
cggagatggaagacttggcagctgc

SEQ ID NO: 3112 - DNA, 25 bp, synthetic construct
  source 1..25: mol_type = other DNA; mol_type = other DNA
cggagatggaagactgtgcagctgc

SEQ ID NO: 3113 - DNA, 25 bp, synthetic construct
  source 1..25: mol_type = other DNA; mol_type = other DNA
cggagatggaagactggtcagctgc

SEQ ID NO: 3114 - DNA, 25 bp, synthetic construct
  source 1..25: mol_type = other DNA; mol_type = other DNA
cggagatggaagactgggtagctgc

SEQ ID NO: 3115 - DNA, 25 bp, synthetic construct
  source 1..25: mol_type = other DNA; mol_type = other DNA
ctgagatggaagactgggcagctgc

SEQ ID NO: 3116 - DNA, 25 bp, synthetic construct
  source 1..25: mol_type = other DNA; mol_type = other DNA
cggagatggaagactgggcatctgc

SEQ ID NO: 3117 - DNA, 25 bp, synthetic construct
  source 1..25: mol_type = other DNA; mol_type = other DNA
cggagatggaagactgggcagttgc

SEQ ID NO: 3118 - DNA, 25 bp, synthetic construct
  source 1..25: mol_type = other DNA; mol_type = other DNA
cggagatggaagactgggcagcttc

SEQ ID NO: 3119 - DNA, 25 bp, synthetic construct
  source 1..25: mol_type = other DNA; mol_type = other DNA
cggagatggaagactgggcagctgt

SEQ ID NO: 3120 - DNA, 25 bp, synthetic construct
  source 1..25: mol_type = other DNA; mol_type = other DNA
cgtagatggaagactgggcagctgc

SEQ ID NO: 3121 - DNA, 25 bp, synthetic construct
  source 1..25: mol_type = other DNA; mol_type = other DNA
cggatatggaagactgggcagctgc

SEQ ID NO: 3122 - DNA, 25 bp, synthetic construct
  source 1..25: mol_type = other DNA; mol_type = other DNA
cggagattgaagactgggcagctgc

SEQ ID NO: 3123 - DNA, 25 bp, synthetic construct
  source 1..25: mol_type = other DNA; mol_type = other DNA
cggagatgtaagactgggcagctgc

SEQ ID NO: 3124 - DNA, 25 bp, synthetic construct
  source 1..25: mol_type = other DNA; mol_type = other DNA
cggagatggaaaactaggcagctgc

SEQ ID NO: 3125 - DNA, 25 bp, synthetic construct
  source 1..25: mol_type = other DNA; mol_type = other DNA
cggagatggaaaactgagcagctgc

SEQ ID NO: 3126 - DNA, 25 bp, synthetic construct
  source 1..25: mol_type = other DNA; mol_type = other DNA
cggagatggaaaactggacagctgc

SEQ ID NO: 3127 - DNA, 25 bp, synthetic construct
  source 1..25: mol_type = other DNA; mol_type = other DNA
cggagatggaaaactgggcaactgc

SEQ ID NO: 3128 - DNA, 25 bp, synthetic construct
  source 1..25: mol_type = other DNA; mol_type = other DNA
cggagatggaaaactgggcagctac

SEQ ID NO: 3129 - DNA, 25 bp, synthetic construct
  source 1..25: mol_type = other DNA; mol_type = other DNA
cggagatggaagactaagcagctgc

SEQ ID NO: 3130 - DNA, 25 bp, synthetic construct
  source 1..25: mol_type = other DNA; mol_type = other DNA
cggagatggaagactagacagctgc

SEQ ID NO: 3131 - DNA, 25 bp, synthetic construct
  source 1..25: mol_type = other DNA; mol_type = other DNA
cggagatggaagactaggcaactgc

SEQ ID NO: 3132 - DNA, 25 bp, synthetic construct
  source 1..25: mol_type = other DNA; mol_type = other DNA
cggagatggaagactaggcagctac

SEQ ID NO: 3133 - DNA, 25 bp, synthetic construct
  source 1..25: mol_type = other DNA; mol_type = other DNA
cggagatggaagactgaacagctgc

SEQ ID NO: 3134 - DNA, 25 bp, synthetic construct
  source 1..25: mol_type = other DNA; mol_type = other DNA
cggagatggaagactgagcaactgc

SEQ ID NO: 3135 - DNA, 25 bp, synthetic construct
  source 1..25: mol_type = other DNA; mol_type = other DNA
cggagatggaagactgagcagctac

SEQ ID NO: 3136 - DNA, 25 bp, synthetic construct
  source 1..25: mol_type = other DNA; mol_type = other DNA
cggagatggaagactggacaactgc

SEQ ID NO: 3137 - DNA, 25 bp, synthetic construct
  source 1..25: mol_type = other DNA; mol_type = other DNA
cggagatggaagactggacagctac

SEQ ID NO: 3138 - DNA, 25 bp, synthetic construct
  source 1..25: mol_type = other DNA; mol_type = other DNA
cagagatggaaaactgggcagctgc

SEQ ID NO: 3139 - DNA, 25 bp, synthetic construct
  source 1..25: mol_type = other DNA; mol_type = other DNA
cagagatggaagactaggcagctgc

SEQ ID NO: 3140 - DNA, 25 bp, synthetic construct
  source 1..25: mol_type = other DNA; mol_type = other DNA
cagagatggaagactgagcagctgc

SEQ ID NO: 3141 - DNA, 25 bp, synthetic construct
  source 1..25: mol_type = other DNA; mol_type = other DNA
cagagatggaagactggacagctgc

SEQ ID NO: 3142 - DNA, 25 bp, synthetic construct
  source 1..25: mol_type = other DNA; mol_type = other DNA
cagagatggaagactgggcaactgc

SEQ ID NO: 3143 - DNA, 25 bp, synthetic construct
  source 1..25: mol_type = other DNA; mol_type = other DNA
cagagatggaagactgggcagctac

SEQ ID NO: 3144 - DNA, 25 bp, synthetic construct
  source 1..25: mol_type = other DNA; mol_type = other DNA
caaagatggaagactgggcagctgc

SEQ ID NO: 3145 - DNA, 25 bp, synthetic construct
  source 1..25: mol_type = other DNA; mol_type = other DNA
cagaaatggaagactgggcagctgc

SEQ ID NO: 3146 - DNA, 25 bp, synthetic construct
  source 1..25: mol_type = other DNA; mol_type = other DNA
cagagatagaagactgggcagctgc

SEQ ID NO: 3147 - DNA, 25 bp, synthetic construct
  source 1..25: mol_type = other DNA; mol_type = other DNA
cagagatgaaagactgggcagctgc

SEQ ID NO: 3148 - DNA, 25 bp, synthetic construct
  source 1..25: mol_type = other DNA; mol_type = other DNA
cggagatggaagactgggcaactac

SEQ ID NO: 3149 - DNA, 25 bp, synthetic construct
  source 1..25: mol_type = other DNA; mol_type = other DNA
cgaagatggaaaactgggcagctgc

SEQ ID NO: 3150 - DNA, 25 bp, synthetic construct
  source 1..25: mol_type = other DNA; mol_type = other DNA
cgaagatggaagactaggcagctgc

SEQ ID NO: 3151 - DNA, 25 bp, synthetic construct
  source 1..25: mol_type = other DNA; mol_type = other DNA
cgaagatggaagactgagcagctgc

SEQ ID NO: 3152 - DNA, 25 bp, synthetic construct
  source 1..25: mol_type = other DNA; mol_type = other DNA
cgaagatggaagactggacagctgc

SEQ ID NO: 3153 - DNA, 25 bp, synthetic construct
  source 1..25: mol_type = other DNA; mol_type = other DNA
cgaagatggaagactgggcaactgc

SEQ ID NO: 3154 - DNA, 25 bp, synthetic construct
  source 1..25: mol_type = other DNA; mol_type = other DNA
cgaagatggaagactgggcagctac

SEQ ID NO: 3155 - DNA, 25 bp, synthetic construct
  source 1..25: mol_type = other DNA; mol_type = other DNA
cgaaaatggaagactgggcagctgc

SEQ ID NO: 3156 - DNA, 25 bp, synthetic construct
  source 1..25: mol_type = other DNA; mol_type = other DNA
cgaagatagaagactgggcagctgc

SEQ ID NO: 3157 - DNA, 25 bp, synthetic construct
  source 1..25: mol_type = other DNA; mol_type = other DNA
cgaagatgaaagactgggcagctgc

SEQ ID NO: 3158 - DNA, 25 bp, synthetic construct
  source 1..25: mol_type = other DNA; mol_type = other DNA
cggaaatggaaaactgggcagctgc

SEQ ID NO: 3159 - DNA, 25 bp, synthetic construct
  source 1..25: mol_type = other DNA; mol_type = other DNA
cggaaatggaagactaggcagctgc

SEQ ID NO: 3160 - DNA, 25 bp, synthetic construct
  source 1..25: mol_type = other DNA; mol_type = other DNA
cggaaatggaagactgagcagctgc

SEQ ID NO: 3161 - DNA, 25 bp, synthetic construct
  source 1..25: mol_type = other DNA; mol_type = other DNA
cggaaatggaagactggacagctgc

SEQ ID NO: 3162 - DNA, 25 bp, synthetic construct
  source 1..25: mol_type = other DNA; mol_type = other DNA
cggaaatggaagactgggcaactgc

SEQ ID NO: 3163 - DNA, 25 bp, synthetic construct
  source 1..25: mol_type = other DNA; mol_type = other DNA
cggaaatggaagactgggcagctac

SEQ ID NO: 3164 - DNA, 25 bp, synthetic construct
  source 1..25: mol_type = other DNA; mol_type = other DNA
cggaaatagaagactgggcagctgc

SEQ ID NO: 3165 - DNA, 25 bp, synthetic construct
  source 1..25: mol_type = other DNA; mol_type = other DNA
cggaaatgaaagactgggcagctgc

SEQ ID NO: 3166 - DNA, 25 bp, synthetic construct
  source 1..25: mol_type = other DNA; mol_type = other DNA
cggagatagaagactaggcagctgc

SEQ ID NO: 3167 - DNA, 25 bp, synthetic construct
  source 1..25: mol_type = other DNA; mol_type = other DNA
cggagatagaagactgagcagctgc

SEQ ID NO: 3168 - DNA, 25 bp, synthetic construct
  source 1..25: mol_type = other DNA; mol_type = other DNA
cggagatagaagactggacagctgc

SEQ ID NO: 3169 - DNA, 25 bp, synthetic construct
  source 1..25: mol_type = other DNA; mol_type = other DNA
cggagatagaagactgggcaactgc

SEQ ID NO: 3170 - DNA, 25 bp, synthetic construct
  source 1..25: mol_type = other DNA; mol_type = other DNA
cggagatagaagactgggcagctac

SEQ ID NO: 3171 - DNA, 25 bp, synthetic construct
  source 1..25: mol_type = other DNA; mol_type = other DNA
cggagatgaaagactaggcagctgc

SEQ ID NO: 3172 - DNA, 25 bp, synthetic construct
  source 1..25: mol_type = other DNA; mol_type = other DNA
cggagatgaaagactgagcagctgc

SEQ ID NO: 3173 - DNA, 25 bp, synthetic construct
  source 1..25: mol_type = other DNA; mol_type = other DNA
cggagatgaaagactggacagctgc

SEQ ID NO: 3174 - DNA, 25 bp, synthetic construct
  source 1..25: mol_type = other DNA; mol_type = other DNA
cggagatgaaagactgggcaactgc

SEQ ID NO: 3175 - DNA, 25 bp, synthetic construct
  source 1..25: mol_type = other DNA; mol_type = other DNA
cggagatgaaagactgggcagctac

SEQ ID NO: 3176 - DNA, 25 bp, synthetic construct
  source 1..25: mol_type = other DNA; mol_type = other DNA
cggagatggaagactgggcagctac

SEQ ID NO: 3177 - DNA, 25 bp, synthetic construct
  source 1..25: mol_type = other DNA; mol_type = other DNA
ccggagatggaagactgggcagctg

SEQ ID NO: 3178 - DNA, 25 bp, synthetic construct
  source 1..25: mol_type = other DNA; mol_type = other DNA
tcggagatggaagactgggcagctg

SEQ ID NO: 3179 - DNA, 25 bp, synthetic construct
  source 1..25: mol_type = other DNA; mol_type = other DNA
ccggagatgtaagactgggcagctg

SEQ ID NO: 3180 - DNA, 25 bp, synthetic construct
  source 1..25: mol_type = other DNA; mol_type = other DNA
ccggagatggaatactgggcagctg

SEQ ID NO: 3181 - DNA, 25 bp, synthetic construct
  source 1..25: mol_type = other DNA; mol_type = other DNA
ccggagatggaagattgggcagctg

SEQ ID NO: 3182 - DNA, 25 bp, synthetic construct
  source 1..25: mol_type = other DNA; mol_type = other DNA
ccggagatggaagacttggcagctg

SEQ ID NO: 3183 - DNA, 25 bp, synthetic construct
  source 1..25: mol_type = other DNA; mol_type = other DNA
ccggagatggaagactgtgcagctg

SEQ ID NO: 3184 - DNA, 25 bp, synthetic construct
  source 1..25: mol_type = other DNA; mol_type = other DNA
ccggagatggaagactggtcagctg

SEQ ID NO: 3185 - DNA, 25 bp, synthetic construct
  source 1..25: mol_type = other DNA; mol_type = other DNA
ctggagatggaagactgggcagctg

SEQ ID NO: 3186 - DNA, 25 bp, synthetic construct
  source 1..25: mol_type = other DNA; mol_type = other DNA
ccggagatggaagactgggtagctg

SEQ ID NO: 3187 - DNA, 25 bp, synthetic construct
  source 1..25: mol_type = other DNA; mol_type = other DNA
ccggagatggaagactgggcatctg

SEQ ID NO: 3188 - DNA, 25 bp, synthetic construct
  source 1..25: mol_type = other DNA; mol_type = other DNA
ccggagatggaagactgggcagttg

SEQ ID NO: 3189 - DNA, 25 bp, synthetic construct
  source 1..25: mol_type = other DNA; mol_type = other DNA
cctgagatggaagactgggcagctg

SEQ ID NO: 3190 - DNA, 25 bp, synthetic construct
  source 1..25: mol_type = other DNA; mol_type = other DNA
ccgtagatggaagactgggcagctg

SEQ ID NO: 3191 - DNA, 25 bp, synthetic construct
  source 1..25: mol_type = other DNA; mol_type = other DNA
ccggatatggaagactgggcagctg

SEQ ID NO: 3192 - DNA, 25 bp, synthetic construct
  source 1..25: mol_type = other DNA; mol_type = other DNA
ccggagattgaagactgggcagctg

SEQ ID NO: 3193 - DNA, 25 bp, synthetic construct
  source 1..25: mol_type = other DNA; mol_type = other DNA
ccggagatgaaagactaggcagctg

SEQ ID NO: 3194 - DNA, 25 bp, synthetic construct
  source 1..25: mol_type = other DNA; mol_type = other DNA
ccggagatgaaagactgagcagctg

SEQ ID NO: 3195 - DNA, 25 bp, synthetic construct
  source 1..25: mol_type = other DNA; mol_type = other DNA
ccggagatgaaagactggacagctg

SEQ ID NO: 3196 - DNA, 25 bp, synthetic construct
  source 1..25: mol_type = other DNA; mol_type = other DNA
ccggagatgaaagactgggcaactg

SEQ ID NO: 3197 - DNA, 25 bp, synthetic construct
  source 1..25: mol_type = other DNA; mol_type = other DNA
ccggagatgaaagactgggcagcta

SEQ ID NO: 3198 - DNA, 25 bp, synthetic construct
  source 1..25: mol_type = other DNA; mol_type = other DNA
ccggagatggaaaactaggcagctg

SEQ ID NO: 3199 - DNA, 25 bp, synthetic construct
  source 1..25: mol_type = other DNA; mol_type = other DNA
ccggagatggaaaactgagcagctg

SEQ ID NO: 3200 - DNA, 25 bp, synthetic construct
  source 1..25: mol_type = other DNA; mol_type = other DNA
ccggagatggaaaactggacagctg

SEQ ID NO: 3201 - DNA, 25 bp, synthetic construct
  source 1..25: mol_type = other DNA; mol_type = other DNA
ccggagatggaaaactgggcaactg

SEQ ID NO: 3202 - DNA, 25 bp, synthetic construct
  source 1..25: mol_type = other DNA; mol_type = other DNA
ccggagatggaaaactgggcagcta

SEQ ID NO: 3203 - DNA, 25 bp, synthetic construct
  source 1..25: mol_type = other DNA; mol_type = other DNA
ccggagatggaagactaagcagctg

SEQ ID NO: 3204 - DNA, 25 bp, synthetic construct
  source 1..25: mol_type = other DNA; mol_type = other DNA
ccggagatggaagactagacagctg

SEQ ID NO: 3205 - DNA, 25 bp, synthetic construct
  source 1..25: mol_type = other DNA; mol_type = other DNA
ccggagatggaagactaggcaactg

SEQ ID NO: 3206 - DNA, 25 bp, synthetic construct
  source 1..25: mol_type = other DNA; mol_type = other DNA
ccggagatggaagactaggcagcta

SEQ ID NO: 3207 - DNA, 25 bp, synthetic construct
  source 1..25: mol_type = other DNA; mol_type = other DNA
ccggagatggaagactgaacagctg

SEQ ID NO: 3208 - DNA, 25 bp, synthetic construct
  source 1..25: mol_type = other DNA; mol_type = other DNA
ccggagatggaagactgagcaactg

SEQ ID NO: 3209 - DNA, 25 bp, synthetic construct
  source 1..25: mol_type = other DNA; mol_type = other DNA
ccggagatggaagactgagcagcta

SEQ ID NO: 3210 - DNA, 25 bp, synthetic construct
  source 1..25: mol_type = other DNA; mol_type = other DNA
ccggagatggaagactggacaactg

SEQ ID NO: 3211 - DNA, 25 bp, synthetic construct
  source 1..25: mol_type = other DNA; mol_type = other DNA
ccggagatggaagactggacagcta

SEQ ID NO: 3212 - DNA, 25 bp, synthetic construct
  source 1..25: mol_type = other DNA; mol_type = other DNA
ccggagatggaagactgggcaacta

SEQ ID NO: 3213 - DNA, 25 bp, synthetic construct
  source 1..25: mol_type = other DNA; mol_type = other DNA
ccagagatgaaagactgggcagctg

SEQ ID NO: 3214 - DNA, 25 bp, synthetic construct
  source 1..25: mol_type = other DNA; mol_type = other DNA
ccagagatggaaaactgggcagctg

SEQ ID NO: 3215 - DNA, 25 bp, synthetic construct
  source 1..25: mol_type = other DNA; mol_type = other DNA
ccagagatggaagactaggcagctg

SEQ ID NO: 3216 - DNA, 25 bp, synthetic construct
  source 1..25: mol_type = other DNA; mol_type = other DNA
ccagagatggaagactgagcagctg

SEQ ID NO: 3217 - DNA, 25 bp, synthetic construct
  source 1..25: mol_type = other DNA; mol_type = other DNA
ccagagatggaagactggacagctg

SEQ ID NO: 3218 - DNA, 25 bp, synthetic construct
  source 1..25: mol_type = other DNA; mol_type = other DNA
ccagagatggaagactgggcaactg

SEQ ID NO: 3219 - DNA, 25 bp, synthetic construct
  source 1..25: mol_type = other DNA; mol_type = other DNA
ccagagatggaagactgggcagcta

SEQ ID NO: 3220 - DNA, 25 bp, synthetic construct
  source 1..25: mol_type = other DNA; mol_type = other DNA
ccaaagatggaagactgggcagctg

SEQ ID NO: 3221 - DNA, 25 bp, synthetic construct
  source 1..25: mol_type = other DNA; mol_type = other DNA
ccagaaatggaagactgggcagctg

SEQ ID NO: 3222 - DNA, 25 bp, synthetic construct
  source 1..25: mol_type = other DNA; mol_type = other DNA
ccagagatagaagactgggcagctg

SEQ ID NO: 3223 - DNA, 25 bp, synthetic construct
  source 1..25: mol_type = other DNA; mol_type = other DNA
ccgaagatgaaagactgggcagctg

SEQ ID NO: 3224 - DNA, 25 bp, synthetic construct
  source 1..25: mol_type = other DNA; mol_type = other DNA
ccgaagatggaaaactgggcagctg

SEQ ID NO: 3225 - DNA, 25 bp, synthetic construct
  source 1..25: mol_type = other DNA; mol_type = other DNA
ccgaagatggaagactaggcagctg

SEQ ID NO: 3226 - DNA, 25 bp, synthetic construct
  source 1..25: mol_type = other DNA; mol_type = other DNA
ccgaagatggaagactgagcagctg

SEQ ID NO: 3227 - DNA, 25 bp, synthetic construct
  source 1..25: mol_type = other DNA; mol_type = other DNA
ccgaagatggaagactggacagctg

SEQ ID NO: 3228 - DNA, 25 bp, synthetic construct
  source 1..25: mol_type = other DNA; mol_type = other DNA
ccgaagatggaagactgggcaactg

SEQ ID NO: 3229 - DNA, 25 bp, synthetic construct
  source 1..25: mol_type = other DNA; mol_type = other DNA
ccgaagatggaagactgggcagcta

SEQ ID NO: 3230 - DNA, 25 bp, synthetic construct
  source 1..25: mol_type = other DNA; mol_type = other DNA
ccgaaaatggaagactgggcagctg

SEQ ID NO: 3231 - DNA, 25 bp, synthetic construct
  source 1..25: mol_type = other DNA; mol_type = other DNA
ccgaagatagaagactgggcagctg

SEQ ID NO: 3232 - DNA, 25 bp, synthetic construct
  source 1..25: mol_type = other DNA; mol_type = other DNA
ccggaaatgaaagactgggcagctg

SEQ ID NO: 3233 - DNA, 25 bp, synthetic construct
  source 1..25: mol_type = other DNA; mol_type = other DNA
ccggaaatggaaaactgggcagctg

SEQ ID NO: 3234 - DNA, 25 bp, synthetic construct
  source 1..25: mol_type = other DNA; mol_type = other DNA
ccggaaatggaagactaggcagctg

SEQ ID NO: 3235 - DNA, 25 bp, synthetic construct
  source 1..25: mol_type = other DNA; mol_type = other DNA
ccggaaatggaagactgagcagctg

SEQ ID NO: 3236 - DNA, 25 bp, synthetic construct
  source 1..25: mol_type = other DNA; mol_type = other DNA
ccggaaatggaagactggacagctg

SEQ ID NO: 3237 - DNA, 25 bp, synthetic construct
  source 1..25: mol_type = other DNA; mol_type = other DNA
ccggaaatggaagactgggcaactg

SEQ ID NO: 3238 - DNA, 25 bp, synthetic construct
  source 1..25: mol_type = other DNA; mol_type = other DNA
ccggaaatggaagactgggcagcta

SEQ ID NO: 3239 - DNA, 25 bp, synthetic construct
  source 1..25: mol_type = other DNA; mol_type = other DNA
ccggaaatagaagactgggcagctg

SEQ ID NO: 3240 - DNA, 25 bp, synthetic construct
  source 1..25: mol_type = other DNA; mol_type = other DNA
ccggagatagaagactaggcagctg

SEQ ID NO: 3241 - DNA, 25 bp, synthetic construct
  source 1..25: mol_type = other DNA; mol_type = other DNA
ccggagatagaagactgagcagctg

SEQ ID NO: 3242 - DNA, 25 bp, synthetic construct
  source 1..25: mol_type = other DNA; mol_type = other DNA
ccggagatagaagactggacagctg

SEQ ID NO: 3243 - DNA, 25 bp, synthetic construct
  source 1..25: mol_type = other DNA; mol_type = other DNA
ccggagatagaagactgggcaactg

SEQ ID NO: 3244 - DNA, 25 bp, synthetic construct
  source 1..25: mol_type = other DNA; mol_type = other DNA
ccggagatagaagactgggcagcta

SEQ ID NO: 3245 - DNA, 25 bp, synthetic construct
  source 1..25: mol_type = other DNA; mol_type = other DNA
ccggagatggaagactgggcagcta

SEQ ID NO: 3246 - DNA, 25 bp, synthetic construct
  source 1..25: mol_type = other DNA; mol_type = other DNA
tccggagatggaagactgggcagct

SEQ ID NO: 3247 - DNA, 25 bp, synthetic construct
  source 1..25: mol_type = other DNA; mol_type = other DNA
gccggagattgaagactgggcagct

SEQ ID NO: 3248 - DNA, 25 bp, synthetic construct
  source 1..25: mol_type = other DNA; mol_type = other DNA
gccggagatgtaagactgggcagct

SEQ ID NO: 3249 - DNA, 25 bp, synthetic construct
  source 1..25: mol_type = other DNA; mol_type = other DNA
gccggagatggaatactgggcagct

SEQ ID NO: 3250 - DNA, 25 bp, synthetic construct
  source 1..25: mol_type = other DNA; mol_type = other DNA
gccggagatggaagattgggcagct

SEQ ID NO: 3251 - DNA, 25 bp, synthetic construct
  source 1..25: mol_type = other DNA; mol_type = other DNA
gccggagatggaagacttggcagct

SEQ ID NO: 3252 - DNA, 25 bp, synthetic construct
  source 1..25: mol_type = other DNA; mol_type = other DNA
gccggagatggaagactgtgcagct

SEQ ID NO: 3253 - DNA, 25 bp, synthetic construct
  source 1..25: mol_type = other DNA; mol_type = other DNA
gtcggagatggaagactgggcagct

SEQ ID NO: 3254 - DNA, 25 bp, synthetic construct
  source 1..25: mol_type = other DNA; mol_type = other DNA
gccggagatggaagactggtcagct

SEQ ID NO: 3255 - DNA, 25 bp, synthetic construct
  source 1..25: mol_type = other DNA; mol_type = other DNA
gccggagatggaagactgggtagct

SEQ ID NO: 3256 - DNA, 25 bp, synthetic construct
  source 1..25: mol_type = other DNA; mol_type = other DNA
gccggagatggaagactgggcatct

SEQ ID NO: 3257 - DNA, 25 bp, synthetic construct
  source 1..25: mol_type = other DNA; mol_type = other DNA
gccggagatggaagactgggcagtt

SEQ ID NO: 3258 - DNA, 25 bp, synthetic construct
  source 1..25: mol_type = other DNA; mol_type = other DNA
gctggagatggaagactgggcagct

SEQ ID NO: 3259 - DNA, 25 bp, synthetic construct
  source 1..25: mol_type = other DNA; mol_type = other DNA
gcctgagatggaagactgggcagct

SEQ ID NO: 3260 - DNA, 25 bp, synthetic construct
  source 1..25: mol_type = other DNA; mol_type = other DNA
gccgtagatggaagactgggcagct

SEQ ID NO: 3261 - DNA, 25 bp, synthetic construct
  source 1..25: mol_type = other DNA; mol_type = other DNA
gccggatatggaagactgggcagct

SEQ ID NO: 3262 - DNA, 25 bp, synthetic construct
  source 1..25: mol_type = other DNA; mol_type = other DNA
accggagatagaagactgggcagct

SEQ ID NO: 3263 - DNA, 25 bp, synthetic construct
  source 1..25: mol_type = other DNA; mol_type = other DNA
accggagatgaaagactgggcagct

SEQ ID NO: 3264 - DNA, 25 bp, synthetic construct
  source 1..25: mol_type = other DNA; mol_type = other DNA
accggagatggaaaactgggcagct

SEQ ID NO: 3265 - DNA, 25 bp, synthetic construct
  source 1..25: mol_type = other DNA; mol_type = other DNA
accggagatggaagactaggcagct

SEQ ID NO: 3266 - DNA, 25 bp, synthetic construct
  source 1..25: mol_type = other DNA; mol_type = other DNA
accggagatggaagactgagcagct

SEQ ID NO: 3267 - DNA, 25 bp, synthetic construct
  source 1..25: mol_type = other DNA; mol_type = other DNA
accggagatggaagactggacagct

SEQ ID NO: 3268 - DNA, 25 bp, synthetic construct
  source 1..25: mol_type = other DNA; mol_type = other DNA
accggagatggaagactgggcaact

SEQ ID NO: 3269 - DNA, 25 bp, synthetic construct
  source 1..25: mol_type = other DNA; mol_type = other DNA
accagagatggaagactgggcagct

SEQ ID NO: 3270 - DNA, 25 bp, synthetic construct
  source 1..25: mol_type = other DNA; mol_type = other DNA
accgaagatggaagactgggcagct

SEQ ID NO: 3271 - DNA, 25 bp, synthetic construct
  source 1..25: mol_type = other DNA; mol_type = other DNA
accggaaatggaagactgggcagct

SEQ ID NO: 3272 - DNA, 25 bp, synthetic construct
  source 1..25: mol_type = other DNA; mol_type = other DNA
gccggagatagaagactaggcagct

SEQ ID NO: 3273 - DNA, 25 bp, synthetic construct
  source 1..25: mol_type = other DNA; mol_type = other DNA
gccggagatagaagactgagcagct

SEQ ID NO: 3274 - DNA, 25 bp, synthetic construct
  source 1..25: mol_type = other DNA; mol_type = other DNA
gccggagatagaagactggacagct

SEQ ID NO: 3275 - DNA, 25 bp, synthetic construct
  source 1..25: mol_type = other DNA; mol_type = other DNA
gccggagatagaagactgggcaact

SEQ ID NO: 3276 - DNA, 25 bp, synthetic construct
  source 1..25: mol_type = other DNA; mol_type = other DNA
gccggagatgaaagactaggcagct

SEQ ID NO: 3277 - DNA, 25 bp, synthetic construct
  source 1..25: mol_type = other DNA; mol_type = other DNA
gccggagatgaaagactgagcagct

SEQ ID NO: 3278 - DNA, 25 bp, synthetic construct
  source 1..25: mol_type = other DNA; mol_type = other DNA
gccggagatgaaagactggacagct

SEQ ID NO: 3279 - DNA, 25 bp, synthetic construct
  source 1..25: mol_type = other DNA; mol_type = other DNA
gccggagatgaaagactgggcaact

SEQ ID NO: 3280 - DNA, 25 bp, synthetic construct
  source 1..25: mol_type = other DNA; mol_type = other DNA
gccggagatggaaaactaggcagct

SEQ ID NO: 3281 - DNA, 25 bp, synthetic construct
  source 1..25: mol_type = other DNA; mol_type = other DNA
gccggagatggaaaactgagcagct

SEQ ID NO: 3282 - DNA, 25 bp, synthetic construct
  source 1..25: mol_type = other DNA; mol_type = other DNA
gccggagatggaaaactggacagct

SEQ ID NO: 3283 - DNA, 25 bp, synthetic construct
  source 1..25: mol_type = other DNA; mol_type = other DNA
gccggagatggaaaactgggcaact

SEQ ID NO: 3284 - DNA, 25 bp, synthetic construct
  source 1..25: mol_type = other DNA; mol_type = other DNA
gccggagatggaagactaagcagct

SEQ ID NO: 3285 - DNA, 25 bp, synthetic construct
  source 1..25: mol_type = other DNA; mol_type = other DNA
gccggagatggaagactagacagct

SEQ ID NO: 3286 - DNA, 25 bp, synthetic construct
  source 1..25: mol_type = other DNA; mol_type = other DNA
gccggagatggaagactaggcaact

SEQ ID NO: 3287 - DNA, 25 bp, synthetic construct
  source 1..25: mol_type = other DNA; mol_type = other DNA
gccggagatggaagactgaacagct

SEQ ID NO: 3288 - DNA, 25 bp, synthetic construct
  source 1..25: mol_type = other DNA; mol_type = other DNA
gccggagatggaagactgagcaact

SEQ ID NO: 3289 - DNA, 25 bp, synthetic construct
  source 1..25: mol_type = other DNA; mol_type = other DNA
gccggagatggaagactggacaact

SEQ ID NO: 3290 - DNA, 25 bp, synthetic construct
  source 1..25: mol_type = other DNA; mol_type = other DNA
gccagagatagaagactgggcagct

SEQ ID NO: 3291 - DNA, 25 bp, synthetic construct
  source 1..25: mol_type = other DNA; mol_type = other DNA
gccagagatgaaagactgggcagct

SEQ ID NO: 3292 - DNA, 25 bp, synthetic construct
  source 1..25: mol_type = other DNA; mol_type = other DNA
gccagagatggaaaactgggcagct

SEQ ID NO: 3293 - DNA, 25 bp, synthetic construct
  source 1..25: mol_type = other DNA; mol_type = other DNA
gccagagatggaagactaggcagct

SEQ ID NO: 3294 - DNA, 25 bp, synthetic construct
  source 1..25: mol_type = other DNA; mol_type = other DNA
gccagagatggaagactgagcagct

SEQ ID NO: 3295 - DNA, 25 bp, synthetic construct
  source 1..25: mol_type = other DNA; mol_type = other DNA
gccagagatggaagactggacagct

SEQ ID NO: 3296 - DNA, 25 bp, synthetic construct
  source 1..25: mol_type = other DNA; mol_type = other DNA
gccagagatggaagactgggcaact

SEQ ID NO: 3297 - DNA, 25 bp, synthetic construct
  source 1..25: mol_type = other DNA; mol_type = other DNA
gccaaagatggaagactgggcagct

SEQ ID NO: 3298 - DNA, 25 bp, synthetic construct
  source 1..25: mol_type = other DNA; mol_type = other DNA
gccagaaatggaagactgggcagct

SEQ ID NO: 3299 - DNA, 25 bp, synthetic construct
  source 1..25: mol_type = other DNA; mol_type = other DNA
gccgaagatagaagactgggcagct

SEQ ID NO: 3300 - DNA, 25 bp, synthetic construct
  source 1..25: mol_type = other DNA; mol_type = other DNA
gccgaagatgaaagactgggcagct

SEQ ID NO: 3301 - DNA, 25 bp, synthetic construct
  source 1..25: mol_type = other DNA; mol_type = other DNA
gccgaagatggaaaactgggcagct

SEQ ID NO: 3302 - DNA, 25 bp, synthetic construct
  source 1..25: mol_type = other DNA; mol_type = other DNA
gccgaagatggaagactaggcagct

SEQ ID NO: 3303 - DNA, 25 bp, synthetic construct
  source 1..25: mol_type = other DNA; mol_type = other DNA
gccgaagatggaagactgagcagct

SEQ ID NO: 3304 - DNA, 25 bp, synthetic construct
  source 1..25: mol_type = other DNA; mol_type = other DNA
gccgaagatggaagactggacagct

SEQ ID NO: 3305 - DNA, 25 bp, synthetic construct
  source 1..25: mol_type = other DNA; mol_type = other DNA
gccgaagatggaagactgggcaact

SEQ ID NO: 3306 - DNA, 25 bp, synthetic construct
  source 1..25: mol_type = other DNA; mol_type = other DNA
gccgaaaatggaagactgggcagct

SEQ ID NO: 3307 - DNA, 25 bp, synthetic construct
  source 1..25: mol_type = other DNA; mol_type = other DNA
gccggaaatagaagactgggcagct

SEQ ID NO: 3308 - DNA, 25 bp, synthetic construct
  source 1..25: mol_type = other DNA; mol_type = other DNA
gccggaaatgaaagactgggcagct

SEQ ID NO: 3309 - DNA, 25 bp, synthetic construct
  source 1..25: mol_type = other DNA; mol_type = other DNA
gccggaaatggaaaactgggcagct

SEQ ID NO: 3310 - DNA, 25 bp, synthetic construct
  source 1..25: mol_type = other DNA; mol_type = other DNA
gccggaaatggaagactaggcagct

SEQ ID NO: 3311 - DNA, 25 bp, synthetic construct
  source 1..25: mol_type = other DNA; mol_type = other DNA
gccggaaatggaagactgagcagct

SEQ ID NO: 3312 - DNA, 25 bp, synthetic construct
  source 1..25: mol_type = other DNA; mol_type = other DNA
gccggaaatggaagactggacagct

SEQ ID NO: 3313 - DNA, 25 bp, synthetic construct
  source 1..25: mol_type = other DNA; mol_type = other DNA
gccggaaatggaagactgggcaact

SEQ ID NO: 3314 - DNA, 25 bp, synthetic construct
  source 1..25: mol_type = other DNA; mol_type = other DNA
gccggagatggaagactgggcaact

SEQ ID NO: 3315 - DNA, 25 bp, synthetic construct
  source 1..25: mol_type = other DNA; mol_type = other DNA
ggccggagatggaagactgggcagc

SEQ ID NO: 3316 - DNA, 25 bp, synthetic construct
  source 1..25: mol_type = other DNA; mol_type = other DNA
tgccggagatggaagactgggcagc

SEQ ID NO: 3317 - DNA, 25 bp, synthetic construct
  source 1..25: mol_type = other DNA; mol_type = other DNA
ggccggagattgaagactgggcagc

SEQ ID NO: 3318 - DNA, 25 bp, synthetic construct
  source 1..25: mol_type = other DNA; mol_type = other DNA
ggccggagatgtaagactgggcagc

SEQ ID NO: 3319 - DNA, 25 bp, synthetic construct
  source 1..25: mol_type = other DNA; mol_type = other DNA
ggccggagatggaatactgggcagc

SEQ ID NO: 3320 - DNA, 25 bp, synthetic construct
  source 1..25: mol_type = other DNA; mol_type = other DNA
ggccggagatggaagattgggcagc

SEQ ID NO: 3321 - DNA, 25 bp, synthetic construct
  source 1..25: mol_type = other DNA; mol_type = other DNA
ggccggagatggaagacttggcagc

SEQ ID NO: 3322 - DNA, 25 bp, synthetic construct
  source 1..25: mol_type = other DNA; mol_type = other DNA
gtccggagatggaagactgggcagc

SEQ ID NO: 3323 - DNA, 25 bp, synthetic construct
  source 1..25: mol_type = other DNA; mol_type = other DNA
ggccggagatggaagactgtgcagc

SEQ ID NO: 3324 - DNA, 25 bp, synthetic construct
  source 1..25: mol_type = other DNA; mol_type = other DNA
ggccggagatggaagactggtcagc

SEQ ID NO: 3325 - DNA, 25 bp, synthetic construct
  source 1..25: mol_type = other DNA; mol_type = other DNA
ggccggagatggaagactgggtagc

SEQ ID NO: 3326 - DNA, 25 bp, synthetic construct
  source 1..25: mol_type = other DNA; mol_type = other DNA
ggccggagatggaagactgggcatc

SEQ ID NO: 3327 - DNA, 25 bp, synthetic construct
  source 1..25: mol_type = other DNA; mol_type = other DNA
ggccggagatggaagactgggcagt

SEQ ID NO: 3328 - DNA, 25 bp, synthetic construct
  source 1..25: mol_type = other DNA; mol_type = other DNA
ggtcggagatggaagactgggcagc

SEQ ID NO: 3329 - DNA, 25 bp, synthetic construct
  source 1..25: mol_type = other DNA; mol_type = other DNA
ggctggagatggaagactgggcagc

SEQ ID NO: 3330 - DNA, 25 bp, synthetic construct
  source 1..25: mol_type = other DNA; mol_type = other DNA
ggcctgagatggaagactgggcagc

SEQ ID NO: 3331 - DNA, 25 bp, synthetic construct
  source 1..25: mol_type = other DNA; mol_type = other DNA
ggccgtagatggaagactgggcagc

SEQ ID NO: 3332 - DNA, 25 bp, synthetic construct
  source 1..25: mol_type = other DNA; mol_type = other DNA
ggccggatatggaagactgggcagc

SEQ ID NO: 3333 - DNA, 25 bp, synthetic construct
  source 1..25: mol_type = other DNA; mol_type = other DNA
agccggagatagaagactgggcagc

SEQ ID NO: 3334 - DNA, 25 bp, synthetic construct
  source 1..25: mol_type = other DNA; mol_type = other DNA
agccggagatgaaagactgggcagc

SEQ ID NO: 3335 - DNA, 25 bp, synthetic construct
  source 1..25: mol_type = other DNA; mol_type = other DNA
agccggagatggaaaactgggcagc

SEQ ID NO: 3336 - DNA, 25 bp, synthetic construct
  source 1..25: mol_type = other DNA; mol_type = other DNA
agccggagatggaagactaggcagc

SEQ ID NO: 3337 - DNA, 25 bp, synthetic construct
  source 1..25: mol_type = other DNA; mol_type = other DNA
aaccggagatggaagactgggcagc

SEQ ID NO: 3338 - DNA, 25 bp, synthetic construct
  source 1..25: mol_type = other DNA; mol_type = other DNA
agccggagatggaagactgagcagc

SEQ ID NO: 3339 - DNA, 25 bp, synthetic construct
  source 1..25: mol_type = other DNA; mol_type = other DNA
agccggagatggaagactggacagc

SEQ ID NO: 3340 - DNA, 25 bp, synthetic construct
  source 1..25: mol_type = other DNA; mol_type = other DNA
agccggagatggaagactgggcaac

SEQ ID NO: 3341 - DNA, 25 bp, synthetic construct
  source 1..25: mol_type = other DNA; mol_type = other DNA
agccagagatggaagactgggcagc

SEQ ID NO: 3342 - DNA, 25 bp, synthetic construct
  source 1..25: mol_type = other DNA; mol_type = other DNA
agccgaagatggaagactgggcagc

SEQ ID NO: 3343 - DNA, 25 bp, synthetic construct
  source 1..25: mol_type = other DNA; mol_type = other DNA
agccggaaatggaagactgggcagc

SEQ ID NO: 3344 - DNA, 25 bp, synthetic construct
  source 1..25: mol_type = other DNA; mol_type = other DNA
ggccggagatagaagactaggcagc

SEQ ID NO: 3345 - DNA, 25 bp, synthetic construct
  source 1..25: mol_type = other DNA; mol_type = other DNA
ggccggagatagaagactgagcagc

SEQ ID NO: 3346 - DNA, 25 bp, synthetic construct
  source 1..25: mol_type = other DNA; mol_type = other DNA
ggccggagatagaagactggacagc

SEQ ID NO: 3347 - DNA, 25 bp, synthetic construct
  source 1..25: mol_type = other DNA; mol_type = other DNA
ggccggagatagaagactgggcaac

SEQ ID NO: 3348 - DNA, 25 bp, synthetic construct
  source 1..25: mol_type = other DNA; mol_type = other DNA
ggccggagatgaaagactaggcagc

SEQ ID NO: 3349 - DNA, 25 bp, synthetic construct
  source 1..25: mol_type = other DNA; mol_type = other DNA
ggccggagatgaaagactgagcagc

SEQ ID NO: 3350 - DNA, 25 bp, synthetic construct
  source 1..25: mol_type = other DNA; mol_type = other DNA
ggccggagatgaaagactggacagc

SEQ ID NO: 3351 - DNA, 25 bp, synthetic construct
  source 1..25: mol_type = other DNA; mol_type = other DNA
ggccggagatgaaagactgggcaac

SEQ ID NO: 3352 - DNA, 25 bp, synthetic construct
  source 1..25: mol_type = other DNA; mol_type = other DNA
ggccggagatggaaaactaggcagc

SEQ ID NO: 3353 - DNA, 25 bp, synthetic construct
  source 1..25: mol_type = other DNA; mol_type = other DNA
ggccggagatggaaaactgagcagc

SEQ ID NO: 3354 - DNA, 25 bp, synthetic construct
  source 1..25: mol_type = other DNA; mol_type = other DNA
ggccggagatggaaaactggacagc

SEQ ID NO: 3355 - DNA, 25 bp, synthetic construct
  source 1..25: mol_type = other DNA; mol_type = other DNA
ggccggagatggaaaactgggcaac

SEQ ID NO: 3356 - DNA, 25 bp, synthetic construct
  source 1..25: mol_type = other DNA; mol_type = other DNA
ggccggagatggaagactaagcagc

SEQ ID NO: 3357 - DNA, 25 bp, synthetic construct
  source 1..25: mol_type = other DNA; mol_type = other DNA
ggccggagatggaagactagacagc

SEQ ID NO: 3358 - DNA, 25 bp, synthetic construct
  source 1..25: mol_type = other DNA; mol_type = other DNA
ggccggagatggaagactaggcaac

SEQ ID NO: 3359 - DNA, 25 bp, synthetic construct
  source 1..25: mol_type = other DNA; mol_type = other DNA
gaccggagatagaagactgggcagc

SEQ ID NO: 3360 - DNA, 25 bp, synthetic construct
  source 1..25: mol_type = other DNA; mol_type = other DNA
gaccggagatgaaagactgggcagc

SEQ ID NO: 3361 - DNA, 25 bp, synthetic construct
  source 1..25: mol_type = other DNA; mol_type = other DNA
gaccggagatggaaaactgggcagc

SEQ ID NO: 3362 - DNA, 25 bp, synthetic construct
  source 1..25: mol_type = other DNA; mol_type = other DNA
gaccggagatggaagactaggcagc

SEQ ID NO: 3363 - DNA, 25 bp, synthetic construct
  source 1..25: mol_type = other DNA; mol_type = other DNA
gaccggagatggaagactgagcagc

SEQ ID NO: 3364 - DNA, 25 bp, synthetic construct
  source 1..25: mol_type = other DNA; mol_type = other DNA
gaccggagatggaagactggacagc

SEQ ID NO: 3365 - DNA, 25 bp, synthetic construct
  source 1..25: mol_type = other DNA; mol_type = other DNA
gaccggagatggaagactgggcaac

SEQ ID NO: 3366 - DNA, 25 bp, synthetic construct
  source 1..25: mol_type = other DNA; mol_type = other DNA
gaccagagatggaagactgggcagc

SEQ ID NO: 3367 - DNA, 25 bp, synthetic construct
  source 1..25: mol_type = other DNA; mol_type = other DNA
gaccgaagatggaagactgggcagc

SEQ ID NO: 3368 - DNA, 25 bp, synthetic construct
  source 1..25: mol_type = other DNA; mol_type = other DNA
gaccggaaatggaagactgggcagc

SEQ ID NO: 3369 - DNA, 25 bp, synthetic construct
  source 1..25: mol_type = other DNA; mol_type = other DNA
ggccggagatggaagactgaacagc

SEQ ID NO: 3370 - DNA, 25 bp, synthetic construct
  source 1..25: mol_type = other DNA; mol_type = other DNA
ggccggagatggaagactgagcaac

SEQ ID NO: 3371 - DNA, 25 bp, synthetic construct
  source 1..25: mol_type = other DNA; mol_type = other DNA
ggccggagatggaagactggacaac

SEQ ID NO: 3372 - DNA, 25 bp, synthetic construct
  source 1..25: mol_type = other DNA; mol_type = other DNA
ggccagagatagaagactgggcagc

SEQ ID NO: 3373 - DNA, 25 bp, synthetic construct
  source 1..25: mol_type = other DNA; mol_type = other DNA
ggccagagatgaaagactgggcagc

SEQ ID NO: 3374 - DNA, 25 bp, synthetic construct
  source 1..25: mol_type = other DNA; mol_type = other DNA
ggccagagatggaaaactgggcagc

SEQ ID NO: 3375 - DNA, 25 bp, synthetic construct
  source 1..25: mol_type = other DNA; mol_type = other DNA
ggccagagatggaagactaggcagc

SEQ ID NO: 3376 - DNA, 25 bp, synthetic construct
  source 1..25: mol_type = other DNA; mol_type = other DNA
ggccagagatggaagactgagcagc

SEQ ID NO: 3377 - DNA, 25 bp, synthetic construct
  source 1..25: mol_type = other DNA; mol_type = other DNA
ggccagagatggaagactggacagc

SEQ ID NO: 3378 - DNA, 25 bp, synthetic construct
  source 1..25: mol_type = other DNA; mol_type = other DNA
ggccagagatggaagactgggcaac

SEQ ID NO: 3379 - DNA, 25 bp, synthetic construct
  source 1..25: mol_type = other DNA; mol_type = other DNA
ggccaaagatggaagactgggcagc

SEQ ID NO: 3380 - DNA, 25 bp, synthetic construct
  source 1..25: mol_type = other DNA; mol_type = other DNA
ggccagaaatggaagactgggcagc

SEQ ID NO: 3381 - DNA, 25 bp, synthetic construct
  source 1..25: mol_type = other DNA; mol_type = other DNA
ggccgaagatagaagactgggcagc

SEQ ID NO: 3382 - DNA, 25 bp, synthetic construct
  source 1..25: mol_type = other DNA; mol_type = other DNA
ggccgaagatgaaagactgggcagc

SEQ ID NO: 3383 - DNA, 25 bp, synthetic construct
  source 1..25: mol_type = other DNA; mol_type = other DNA
ggccgaagatggaaaactgggcagc

SEQ ID NO: 3384 - DNA, 25 bp, synthetic construct
  source 1..25: mol_type = other DNA; mol_type = other DNA
ggccgaagatggaagactaggcagc

SEQ ID NO: 3385 - DNA, 25 bp, synthetic construct
  source 1..25: mol_type = other DNA; mol_type = other DNA
ggccgaagatggaagactgagcagc

SEQ ID NO: 3386 - DNA, 25 bp, synthetic construct
  source 1..25: mol_type = other DNA; mol_type = other DNA
ggccgaagatggaagactggacagc

SEQ ID NO: 3387 - DNA, 25 bp, synthetic construct
  source 1..25: mol_type = other DNA; mol_type = other DNA
ggccgaagatggaagactgggcaac

SEQ ID NO: 3388 - DNA, 25 bp, synthetic construct
  source 1..25: mol_type = other DNA; mol_type = other DNA
ggccgaaaatggaagactgggcagc

SEQ ID NO: 3389 - DNA, 25 bp, synthetic construct
  source 1..25: mol_type = other DNA; mol_type = other DNA
ggccggaaatagaagactgggcagc

SEQ ID NO: 3390 - DNA, 25 bp, synthetic construct
  source 1..25: mol_type = other DNA; mol_type = other DNA
ggccggaaatgaaagactgggcagc

SEQ ID NO: 3391 - DNA, 25 bp, synthetic construct
  source 1..25: mol_type = other DNA; mol_type = other DNA
ggccggaaatggaaaactgggcagc

SEQ ID NO: 3392 - DNA, 25 bp, synthetic construct
  source 1..25: mol_type = other DNA; mol_type = other DNA
ggccggaaatggaagactaggcagc

SEQ ID NO: 3393 - DNA, 25 bp, synthetic construct
  source 1..25: mol_type = other DNA; mol_type = other DNA
ggccggaaatggaagactgagcagc

SEQ ID NO: 3394 - DNA, 25 bp, synthetic construct
  source 1..25: mol_type = other DNA; mol_type = other DNA
ggccggaaatggaagactggacagc

SEQ ID NO: 3395 - DNA, 25 bp, synthetic construct
  source 1..25: mol_type = other DNA; mol_type = other DNA
ggccggaaatggaagactgggcaac

SEQ ID NO: 3396 - DNA, 25 bp, synthetic construct
  source 1..25: mol_type = other DNA; mol_type = other DNA
ggccggagatggaagactgggcaac

SEQ ID NO: 3397 - DNA, 25 bp, synthetic construct
  source 1..25: mol_type = other DNA; mol_type = other DNA
gggccggagatggaagactgggcag

SEQ ID NO: 3398 - DNA, 25 bp, synthetic construct
  source 1..25: mol_type = other DNA; mol_type = other DNA
tggccggagatggaagactgggcag

SEQ ID NO: 3399 - DNA, 25 bp, synthetic construct
  source 1..25: mol_type = other DNA; mol_type = other DNA
gggccggagattgaagactgggcag

SEQ ID NO: 3400 - DNA, 25 bp, synthetic construct
  source 1..25: mol_type = other DNA; mol_type = other DNA
gggccggagatgtaagactgggcag

SEQ ID NO: 3401 - DNA, 25 bp, synthetic construct
  source 1..25: mol_type = other DNA; mol_type = other DNA
gggccggagatggaatactgggcag

SEQ ID NO: 3402 - DNA, 25 bp, synthetic construct
  source 1..25: mol_type = other DNA; mol_type = other DNA
gggccggagatggaagattgggcag

SEQ ID NO: 3403 - DNA, 25 bp, synthetic construct
  source 1..25: mol_type = other DNA; mol_type = other DNA
gtgccggagatggaagactgggcag

SEQ ID NO: 3404 - DNA, 25 bp, synthetic construct
  source 1..25: mol_type = other DNA; mol_type = other DNA
gggccggagatggaagacttggcag

SEQ ID NO: 3405 - DNA, 25 bp, synthetic construct
  source 1..25: mol_type = other DNA; mol_type = other DNA
gggccggagatggaagactgtgcag

SEQ ID NO: 3406 - DNA, 25 bp, synthetic construct
  source 1..25: mol_type = other DNA; mol_type = other DNA
gggccggagatggaagactggtcag

SEQ ID NO: 3407 - DNA, 25 bp, synthetic construct
  source 1..25: mol_type = other DNA; mol_type = other DNA
gggccggagatggaagactgggtag

SEQ ID NO: 3408 - DNA, 25 bp, synthetic construct
  source 1..25: mol_type = other DNA; mol_type = other DNA
ggtccggagatggaagactgggcag

SEQ ID NO: 3409 - DNA, 25 bp, synthetic construct
  source 1..25: mol_type = other DNA; mol_type = other DNA
gggtcggagatggaagactgggcag

SEQ ID NO: 3410 - DNA, 25 bp, synthetic construct
  source 1..25: mol_type = other DNA; mol_type = other DNA
gggctggagatggaagactgggcag

SEQ ID NO: 3411 - DNA, 25 bp, synthetic construct
  source 1..25: mol_type = other DNA; mol_type = other DNA
gggcctgagatggaagactgggcag

SEQ ID NO: 3412 - DNA, 25 bp, synthetic construct
  source 1..25: mol_type = other DNA; mol_type = other DNA
gggccgtagatggaagactgggcag

SEQ ID NO: 3413 - DNA, 25 bp, synthetic construct
  source 1..25: mol_type = other DNA; mol_type = other DNA
gggccggatatggaagactgggcag

SEQ ID NO: 3414 - DNA, 25 bp, synthetic construct
  source 1..25: mol_type = other DNA; mol_type = other DNA
aggccggagatagaagactgggcag

SEQ ID NO: 3415 - DNA, 25 bp, synthetic construct
  source 1..25: mol_type = other DNA; mol_type = other DNA
aggccggagatgaaagactgggcag

SEQ ID NO: 3416 - DNA, 25 bp, synthetic construct
  source 1..25: mol_type = other DNA; mol_type = other DNA
aggccggagatggaaaactgggcag

SEQ ID NO: 3417 - DNA, 25 bp, synthetic construct
  source 1..25: mol_type = other DNA; mol_type = other DNA
aagccggagatggaagactgggcag

SEQ ID NO: 3418 - DNA, 25 bp, synthetic construct
  source 1..25: mol_type = other DNA; mol_type = other DNA
aggccggagatggaagactaggcag

SEQ ID NO: 3419 - DNA, 25 bp, synthetic construct
  source 1..25: mol_type = other DNA; mol_type = other DNA
aggccggagatggaagactgagcag

SEQ ID NO: 3420 - DNA, 25 bp, synthetic construct
  source 1..25: mol_type = other DNA; mol_type = other DNA
aggccggagatggaagactggacag

SEQ ID NO: 3421 - DNA, 25 bp, synthetic construct
  source 1..25: mol_type = other DNA; mol_type = other DNA
aggccggagatggaagactgggcaa

SEQ ID NO: 3422 - DNA, 25 bp, synthetic construct
  source 1..25: mol_type = other DNA; mol_type = other DNA
agaccggagatggaagactgggcag

SEQ ID NO: 3423 - DNA, 25 bp, synthetic construct
  source 1..25: mol_type = other DNA; mol_type = other DNA
aggccagagatggaagactgggcag

SEQ ID NO: 3424 - DNA, 25 bp, synthetic construct
  source 1..25: mol_type = other DNA; mol_type = other DNA
aggccgaagatggaagactgggcag

SEQ ID NO: 3425 - DNA, 25 bp, synthetic construct
  source 1..25: mol_type = other DNA; mol_type = other DNA
aggccggaaatggaagactgggcag

SEQ ID NO: 3426 - DNA, 25 bp, synthetic construct
  source 1..25: mol_type = other DNA; mol_type = other DNA
gggccggagatagaagactaggcag

SEQ ID NO: 3427 - DNA, 25 bp, synthetic construct
  source 1..25: mol_type = other DNA; mol_type = other DNA
gggccggagatagaagactgagcag

SEQ ID NO: 3428 - DNA, 25 bp, synthetic construct
  source 1..25: mol_type = other DNA; mol_type = other DNA
gggccggagatagaagactggacag

SEQ ID NO: 3429 - DNA, 25 bp, synthetic construct
  source 1..25: mol_type = other DNA; mol_type = other DNA
gggccggagatagaagactgggcaa

SEQ ID NO: 3430 - DNA, 25 bp, synthetic construct
  source 1..25: mol_type = other DNA; mol_type = other DNA
gggccggagatgaaagactaggcag

SEQ ID NO: 3431 - DNA, 25 bp, synthetic construct
  source 1..25: mol_type = other DNA; mol_type = other DNA
gggccggagatgaaagactgagcag

SEQ ID NO: 3432 - DNA, 25 bp, synthetic construct
  source 1..25: mol_type = other DNA; mol_type = other DNA
gggccggagatgaaagactggacag

SEQ ID NO: 3433 - DNA, 25 bp, synthetic construct
  source 1..25: mol_type = other DNA; mol_type = other DNA
gggccggagatgaaagactgggcaa

SEQ ID NO: 3434 - DNA, 25 bp, synthetic construct
  source 1..25: mol_type = other DNA; mol_type = other DNA
gggccggagatggaaaactaggcag

SEQ ID NO: 3435 - DNA, 25 bp, synthetic construct
  source 1..25: mol_type = other DNA; mol_type = other DNA
gggccggagatggaaaactgagcag

SEQ ID NO: 3436 - DNA, 25 bp, synthetic construct
  source 1..25: mol_type = other DNA; mol_type = other DNA
gggccggagatggaaaactggacag

SEQ ID NO: 3437 - DNA, 25 bp, synthetic construct
  source 1..25: mol_type = other DNA; mol_type = other DNA
gggccggagatggaaaactgggcaa

SEQ ID NO: 3438 - DNA, 25 bp, synthetic construct
  source 1..25: mol_type = other DNA; mol_type = other DNA
gagccggagatagaagactgggcag

SEQ ID NO: 3439 - DNA, 25 bp, synthetic construct
  source 1..25: mol_type = other DNA; mol_type = other DNA
gagccggagatgaaagactgggcag

SEQ ID NO: 3440 - DNA, 25 bp, synthetic construct
  source 1..25: mol_type = other DNA; mol_type = other DNA
gagccggagatggaaaactgggcag

SEQ ID NO: 3441 - DNA, 25 bp, synthetic construct
  source 1..25: mol_type = other DNA; mol_type = other DNA
gagccggagatggaagactaggcag

SEQ ID NO: 3442 - DNA, 25 bp, synthetic construct
  source 1..25: mol_type = other DNA; mol_type = other DNA
gagccggagatggaagactgagcag

SEQ ID NO: 3443 - DNA, 25 bp, synthetic construct
  source 1..25: mol_type = other DNA; mol_type = other DNA
gagccggagatggaagactggacag

SEQ ID NO: 3444 - DNA, 25 bp, synthetic construct
  source 1..25: mol_type = other DNA; mol_type = other DNA
gagccggagatggaagactgggcaa

SEQ ID NO: 3445 - DNA, 25 bp, synthetic construct
  source 1..25: mol_type = other DNA; mol_type = other DNA
gaaccggagatggaagactgggcag

SEQ ID NO: 3446 - DNA, 25 bp, synthetic construct
  source 1..25: mol_type = other DNA; mol_type = other DNA
gagccagagatggaagactgggcag

SEQ ID NO: 3447 - DNA, 25 bp, synthetic construct
  source 1..25: mol_type = other DNA; mol_type = other DNA
gagccgaagatggaagactgggcag

SEQ ID NO: 3448 - DNA, 25 bp, synthetic construct
  source 1..25: mol_type = other DNA; mol_type = other DNA
gagccggaaatggaagactgggcag

SEQ ID NO: 3449 - DNA, 25 bp, synthetic construct
  source 1..25: mol_type = other DNA; mol_type = other DNA
gggccggagatggaagactaagcag

SEQ ID NO: 3450 - DNA, 25 bp, synthetic construct
  source 1..25: mol_type = other DNA; mol_type = other DNA
gggccggagatggaagactagacag

SEQ ID NO: 3451 - DNA, 25 bp, synthetic construct
  source 1..25: mol_type = other DNA; mol_type = other DNA
gggccggagatggaagactaggcaa

SEQ ID NO: 3452 - DNA, 25 bp, synthetic construct
  source 1..25: mol_type = other DNA; mol_type = other DNA
gggccggagatggaagactgaacag

SEQ ID NO: 3453 - DNA, 25 bp, synthetic construct
  source 1..25: mol_type = other DNA; mol_type = other DNA
gggccggagatggaagactgagcaa

SEQ ID NO: 3454 - DNA, 25 bp, synthetic construct
  source 1..25: mol_type = other DNA; mol_type = other DNA
gggccggagatggaagactggacaa

SEQ ID NO: 3455 - DNA, 25 bp, synthetic construct
  source 1..25: mol_type = other DNA; mol_type = other DNA
ggaccggagatagaagactgggcag

SEQ ID NO: 3456 - DNA, 25 bp, synthetic construct
  source 1..25: mol_type = other DNA; mol_type = other DNA
ggaccggagatgaaagactgggcag

SEQ ID NO: 3457 - DNA, 25 bp, synthetic construct
  source 1..25: mol_type = other DNA; mol_type = other DNA
ggaccggagatggaaaactgggcag

SEQ ID NO: 3458 - DNA, 25 bp, synthetic construct
  source 1..25: mol_type = other DNA; mol_type = other DNA
ggaccggagatggaagactaggcag

SEQ ID NO: 3459 - DNA, 25 bp, synthetic construct
  source 1..25: mol_type = other DNA; mol_type = other DNA
ggaccggagatggaagactgagcag

SEQ ID NO: 3460 - DNA, 25 bp, synthetic construct
  source 1..25: mol_type = other DNA; mol_type = other DNA
ggaccggagatggaagactggacag

SEQ ID NO: 3461 - DNA, 25 bp, synthetic construct
  source 1..25: mol_type = other DNA; mol_type = other DNA
ggaccggagatggaagactgggcaa

SEQ ID NO: 3462 - DNA, 25 bp, synthetic construct
  source 1..25: mol_type = other DNA; mol_type = other DNA
ggaccagagatggaagactgggcag

SEQ ID NO: 3463 - DNA, 25 bp, synthetic construct
  source 1..25: mol_type = other DNA; mol_type = other DNA
ggaccgaagatggaagactgggcag

SEQ ID NO: 3464 - DNA, 25 bp, synthetic construct
  source 1..25: mol_type = other DNA; mol_type = other DNA
ggaccggaaatggaagactgggcag

SEQ ID NO: 3465 - DNA, 25 bp, synthetic construct
  source 1..25: mol_type = other DNA; mol_type = other DNA
gggccagagatagaagactgggcag

SEQ ID NO: 3466 - DNA, 25 bp, synthetic construct
  source 1..25: mol_type = other DNA; mol_type = other DNA
gggccagagatgaaagactgggcag

SEQ ID NO: 3467 - DNA, 25 bp, synthetic construct
  source 1..25: mol_type = other DNA; mol_type = other DNA
gggccagagatggaaaactgggcag

SEQ ID NO: 3468 - DNA, 25 bp, synthetic construct
  source 1..25: mol_type = other DNA; mol_type = other DNA
gggccagagatggaagactaggcag

SEQ ID NO: 3469 - DNA, 25 bp, synthetic construct
  source 1..25: mol_type = other DNA; mol_type = other DNA
gggccagagatggaagactgagcag

SEQ ID NO: 3470 - DNA, 25 bp, synthetic construct
  source 1..25: mol_type = other DNA; mol_type = other DNA
gggccagagatggaagactggacag

SEQ ID NO: 3471 - DNA, 25 bp, synthetic construct
  source 1..25: mol_type = other DNA; mol_type = other DNA
gggccagagatggaagactgggcaa

SEQ ID NO: 3472 - DNA, 25 bp, synthetic construct
  source 1..25: mol_type = other DNA; mol_type = other DNA
gggccaaagatggaagactgggcag

SEQ ID NO: 3473 - DNA, 25 bp, synthetic construct
  source 1..25: mol_type = other DNA; mol_type = other DNA
gggccagaaatggaagactgggcag

SEQ ID NO: 3474 - DNA, 25 bp, synthetic construct
  source 1..25: mol_type = other DNA; mol_type = other DNA
gggccgaagatagaagactgggcag

SEQ ID NO: 3475 - DNA, 25 bp, synthetic construct
  source 1..25: mol_type = other DNA; mol_type = other DNA
gggccgaagatgaaagactgggcag

SEQ ID NO: 3476 - DNA, 25 bp, synthetic construct
  source 1..25: mol_type = other DNA; mol_type = other DNA
gggccgaagatggaaaactgggcag

SEQ ID NO: 3477 - DNA, 25 bp, synthetic construct
  source 1..25: mol_type = other DNA; mol_type = other DNA
gggccgaagatggaagactaggcag

SEQ ID NO: 3478 - DNA, 25 bp, synthetic construct
  source 1..25: mol_type = other DNA; mol_type = other DNA
gggccgaagatggaagactgagcag

SEQ ID NO: 3479 - DNA, 25 bp, synthetic construct
  source 1..25: mol_type = other DNA; mol_type = other DNA
gggccgaagatggaagactggacag

SEQ ID NO: 3480 - DNA, 25 bp, synthetic construct
  source 1..25: mol_type = other DNA; mol_type = other DNA
gggccgaagatggaagactgggcaa

SEQ ID NO: 3481 - DNA, 25 bp, synthetic construct
  source 1..25: mol_type = other DNA; mol_type = other DNA
gggccgaaaatggaagactgggcag

SEQ ID NO: 3482 - DNA, 25 bp, synthetic construct
  source 1..25: mol_type = other DNA; mol_type = other DNA
gggccggaaatagaagactgggcag

SEQ ID NO: 3483 - DNA, 25 bp, synthetic construct
  source 1..25: mol_type = other DNA; mol_type = other DNA
gggccggaaatgaaagactgggcag

SEQ ID NO: 3484 - DNA, 25 bp, synthetic construct
  source 1..25: mol_type = other DNA; mol_type = other DNA
gggccggaaatggaaaactgggcag

SEQ ID NO: 3485 - DNA, 25 bp, synthetic construct
  source 1..25: mol_type = other DNA; mol_type = other DNA
gggccggaaatggaagactaggcag

SEQ ID NO: 3486 - DNA, 25 bp, synthetic construct
  source 1..25: mol_type = other DNA; mol_type = other DNA
gggccggaaatggaagactgagcag

SEQ ID NO: 3487 - DNA, 25 bp, synthetic construct
  source 1..25: mol_type = other DNA; mol_type = other DNA
gggccggaaatggaagactggacag

SEQ ID NO: 3488 - DNA, 25 bp, synthetic construct
  source 1..25: mol_type = other DNA; mol_type = other DNA
gggccggaaatggaagactgggcaa

SEQ ID NO: 3489 - DNA, 25 bp, synthetic construct
  source 1..25: mol_type = other DNA; mol_type = other DNA
gggccggagatggaagactgggcaa

SEQ ID NO: 3490 - DNA, 25 bp, synthetic construct
  source 1..25: mol_type = other DNA; mol_type = other DNA
tgggccggagatggaagactgggca

SEQ ID NO: 3491 - DNA, 25 bp, synthetic construct
  source 1..25: mol_type = other DNA; mol_type = other DNA
gtggccggagatggaagactgggca

SEQ ID NO: 3492 - DNA, 25 bp, synthetic construct
  source 1..25: mol_type = other DNA; mol_type = other DNA
ggtgccggagatggaagactgggca

SEQ ID NO: 3493 - DNA, 25 bp, synthetic construct
  source 1..25: mol_type = other DNA; mol_type = other DNA
gggtccggagatggaagactgggca

SEQ ID NO: 3494 - DNA, 25 bp, synthetic construct
  source 1..25: mol_type = other DNA; mol_type = other DNA
agggccggaaatggaagactgggca

SEQ ID NO: 3495 - DNA, 25 bp, synthetic construct
  source 1..25: mol_type = other DNA; mol_type = other DNA
agggccggagatagaagactgggca

SEQ ID NO: 3496 - DNA, 25 bp, synthetic construct
  source 1..25: mol_type = other DNA; mol_type = other DNA
agggccggagatgaaagactgggca

SEQ ID NO: 3497 - DNA, 25 bp, synthetic construct
  source 1..25: mol_type = other DNA; mol_type = other DNA
agggccggagatggaaaactgggca

SEQ ID NO: 3498 - DNA, 25 bp, synthetic construct
  source 1..25: mol_type = other DNA; mol_type = other DNA
aaggccggagatggaagactgggca

SEQ ID NO: 3499 - DNA, 25 bp, synthetic construct
  source 1..25: mol_type = other DNA; mol_type = other DNA
agggccggagatggaagactaggca

SEQ ID NO: 3500 - DNA, 25 bp, synthetic construct
  source 1..25: mol_type = other DNA; mol_type = other DNA
agggccggagatggaagactgagca

SEQ ID NO: 3501 - DNA, 25 bp, synthetic construct
  source 1..25: mol_type = other DNA; mol_type = other DNA
agggccggagatggaagactggaca

SEQ ID NO: 3502 - DNA, 25 bp, synthetic construct
  source 1..25: mol_type = other DNA; mol_type = other DNA
agagccggagatggaagactgggca

SEQ ID NO: 3503 - DNA, 25 bp, synthetic construct
  source 1..25: mol_type = other DNA; mol_type = other DNA
aggaccggagatggaagactgggca

SEQ ID NO: 3504 - DNA, 25 bp, synthetic construct
  source 1..25: mol_type = other DNA; mol_type = other DNA
agggccagagatggaagactgggca

SEQ ID NO: 3505 - DNA, 25 bp, synthetic construct
  source 1..25: mol_type = other DNA; mol_type = other DNA
agggccgaagatggaagactgggca

SEQ ID NO: 3506 - DNA, 25 bp, synthetic construct
  source 1..25: mol_type = other DNA; mol_type = other DNA
gaggccggaaatggaagactgggca

SEQ ID NO: 3507 - DNA, 25 bp, synthetic construct
  source 1..25: mol_type = other DNA; mol_type = other DNA
gaggccggagatagaagactgggca

SEQ ID NO: 3508 - DNA, 25 bp, synthetic construct
  source 1..25: mol_type = other DNA; mol_type = other DNA
gaggccggagatgaaagactgggca

SEQ ID NO: 3509 - DNA, 25 bp, synthetic construct
  source 1..25: mol_type = other DNA; mol_type = other DNA
gaggccggagatggaaaactgggca

SEQ ID NO: 3510 - DNA, 25 bp, synthetic construct
  source 1..25: mol_type = other DNA; mol_type = other DNA
gaggccggagatggaagactaggca

SEQ ID NO: 3511 - DNA, 25 bp, synthetic construct
  source 1..25: mol_type = other DNA; mol_type = other DNA
gaggccggagatggaagactgagca

SEQ ID NO: 3512 - DNA, 25 bp, synthetic construct
  source 1..25: mol_type = other DNA; mol_type = other DNA
gaggccggagatggaagactggaca

SEQ ID NO: 3513 - DNA, 25 bp, synthetic construct
  source 1..25: mol_type = other DNA; mol_type = other DNA
gaagccggagatggaagactgggca

SEQ ID NO: 3514 - DNA, 25 bp, synthetic construct
  source 1..25: mol_type = other DNA; mol_type = other DNA
gagaccggagatggaagactgggca

SEQ ID NO: 3515 - DNA, 25 bp, synthetic construct
  source 1..25: mol_type = other DNA; mol_type = other DNA
gaggccagagatggaagactgggca

SEQ ID NO: 3516 - DNA, 25 bp, synthetic construct
  source 1..25: mol_type = other DNA; mol_type = other DNA
gaggccgaagatggaagactgggca

SEQ ID NO: 3517 - DNA, 25 bp, synthetic construct
  source 1..25: mol_type = other DNA; mol_type = other DNA
ggagccggaaatggaagactgggca

SEQ ID NO: 3518 - DNA, 25 bp, synthetic construct
  source 1..25: mol_type = other DNA; mol_type = other DNA
ggagccggagatagaagactgggca

SEQ ID NO: 3519 - DNA, 25 bp, synthetic construct
  source 1..25: mol_type = other DNA; mol_type = other DNA
ggagccggagatgaaagactgggca

SEQ ID NO: 3520 - DNA, 25 bp, synthetic construct
  source 1..25: mol_type = other DNA; mol_type = other DNA
ggagccggagatggaaaactgggca

SEQ ID NO: 3521 - DNA, 25 bp, synthetic construct
  source 1..25: mol_type = other DNA; mol_type = other DNA
ggagccggagatggaagactaggca

SEQ ID NO: 3522 - DNA, 25 bp, synthetic construct
  source 1..25: mol_type = other DNA; mol_type = other DNA
ggagccggagatggaagactgagca

SEQ ID NO: 3523 - DNA, 25 bp, synthetic construct
  source 1..25: mol_type = other DNA; mol_type = other DNA
ggagccggagatggaagactggaca

SEQ ID NO: 3524 - DNA, 25 bp, synthetic construct
  source 1..25: mol_type = other DNA; mol_type = other DNA
ggaaccggagatggaagactgggca

SEQ ID NO: 3525 - DNA, 25 bp, synthetic construct
  source 1..25: mol_type = other DNA; mol_type = other DNA
ggagccagagatggaagactgggca

SEQ ID NO: 3526 - DNA, 25 bp, synthetic construct
  source 1..25: mol_type = other DNA; mol_type = other DNA
ggagccgaagatggaagactgggca

SEQ ID NO: 3527 - DNA, 25 bp, synthetic construct
  source 1..25: mol_type = other DNA; mol_type = other DNA
gggaccggaaatggaagactgggca

SEQ ID NO: 3528 - DNA, 25 bp, synthetic construct
  source 1..25: mol_type = other DNA; mol_type = other DNA
gggaccggagatagaagactgggca

SEQ ID NO: 3529 - DNA, 25 bp, synthetic construct
  source 1..25: mol_type = other DNA; mol_type = other DNA
gggaccggagatgaaagactgggca

SEQ ID NO: 3530 - DNA, 25 bp, synthetic construct
  source 1..25: mol_type = other DNA; mol_type = other DNA
gggaccggagatggaaaactgggca

SEQ ID NO: 3531 - DNA, 25 bp, synthetic construct
  source 1..25: mol_type = other DNA; mol_type = other DNA
gggaccggagatggaagactaggca

SEQ ID NO: 3532 - DNA, 25 bp, synthetic construct
  source 1..25: mol_type = other DNA; mol_type = other DNA
gggaccggagatggaagactgagca

SEQ ID NO: 3533 - DNA, 25 bp, synthetic construct
  source 1..25: mol_type = other DNA; mol_type = other DNA
gggaccggagatggaagactggaca

SEQ ID NO: 3534 - DNA, 25 bp, synthetic construct
  source 1..25: mol_type = other DNA; mol_type = other DNA
gggaccagagatggaagactgggca

SEQ ID NO: 3535 - DNA, 25 bp, synthetic construct
  source 1..25: mol_type = other DNA; mol_type = other DNA
gggaccgaagatggaagactgggca

SEQ ID NO: 3536 - DNA, 25 bp, synthetic construct
  source 1..25: mol_type = other DNA; mol_type = other DNA
atgggccggagatggaagactgggc

SEQ ID NO: 3537 - DNA, 25 bp, synthetic construct
  source 1..25: mol_type = other DNA; mol_type = other DNA
agtggccggagatggaagactgggc

SEQ ID NO: 3538 - DNA, 25 bp, synthetic construct
  source 1..25: mol_type = other DNA; mol_type = other DNA
aggtgccggagatggaagactgggc

SEQ ID NO: 3539 - DNA, 25 bp, synthetic construct
  source 1..25: mol_type = other DNA; mol_type = other DNA
agggtccggagatggaagactgggc

SEQ ID NO: 3540 - DNA, 25 bp, synthetic construct
  source 1..25: mol_type = other DNA; mol_type = other DNA
aagggccggaaatggaagactgggc

SEQ ID NO: 3541 - DNA, 25 bp, synthetic construct
  source 1..25: mol_type = other DNA; mol_type = other DNA
aagggccggagatagaagactgggc

SEQ ID NO: 3542 - DNA, 25 bp, synthetic construct
  source 1..25: mol_type = other DNA; mol_type = other DNA
aagggccggagatgaaagactgggc

SEQ ID NO: 3543 - DNA, 25 bp, synthetic construct
  source 1..25: mol_type = other DNA; mol_type = other DNA
aagggccggagatggaaaactgggc

SEQ ID NO: 3544 - DNA, 25 bp, synthetic construct
  source 1..25: mol_type = other DNA; mol_type = other DNA
aagggccggagatggaagactaggc

SEQ ID NO: 3545 - DNA, 25 bp, synthetic construct
  source 1..25: mol_type = other DNA; mol_type = other DNA
aagggccggagatggaagactgagc

SEQ ID NO: 3546 - DNA, 25 bp, synthetic construct
  source 1..25: mol_type = other DNA; mol_type = other DNA
aagggccggagatggaagactggac

SEQ ID NO: 3547 - DNA, 25 bp, synthetic construct
  source 1..25: mol_type = other DNA; mol_type = other DNA
aaaggccggagatggaagactgggc

SEQ ID NO: 3548 - DNA, 25 bp, synthetic construct
  source 1..25: mol_type = other DNA; mol_type = other DNA
aagagccggagatggaagactgggc

SEQ ID NO: 3549 - DNA, 25 bp, synthetic construct
  source 1..25: mol_type = other DNA; mol_type = other DNA
aaggaccggagatggaagactgggc

SEQ ID NO: 3550 - DNA, 25 bp, synthetic construct
  source 1..25: mol_type = other DNA; mol_type = other DNA
aagggccagagatggaagactgggc

SEQ ID NO: 3551 - DNA, 25 bp, synthetic construct
  source 1..25: mol_type = other DNA; mol_type = other DNA
aagggccgaagatggaagactgggc

SEQ ID NO: 3552 - DNA, 25 bp, synthetic construct
  source 1..25: mol_type = other DNA; mol_type = other DNA
agaggccggaaatggaagactgggc

SEQ ID NO: 3553 - DNA, 25 bp, synthetic construct
  source 1..25: mol_type = other DNA; mol_type = other DNA
agaggccggagatagaagactgggc

SEQ ID NO: 3554 - DNA, 25 bp, synthetic construct
  source 1..25: mol_type = other DNA; mol_type = other DNA
agaggccggagatgaaagactgggc

SEQ ID NO: 3555 - DNA, 25 bp, synthetic construct
  source 1..25: mol_type = other DNA; mol_type = other DNA
agaggccggagatggaaaactgggc

SEQ ID NO: 3556 - DNA, 25 bp, synthetic construct
  source 1..25: mol_type = other DNA; mol_type = other DNA
agaggccggagatggaagactaggc

SEQ ID NO: 3557 - DNA, 25 bp, synthetic construct
  source 1..25: mol_type = other DNA; mol_type = other DNA
agaggccggagatggaagactgagc

SEQ ID NO: 3558 - DNA, 25 bp, synthetic construct
  source 1..25: mol_type = other DNA; mol_type = other DNA
agaggccggagatggaagactggac

SEQ ID NO: 3559 - DNA, 25 bp, synthetic construct
  source 1..25: mol_type = other DNA; mol_type = other DNA
agaagccggagatggaagactgggc

SEQ ID NO: 3560 - DNA, 25 bp, synthetic construct
  source 1..25: mol_type = other DNA; mol_type = other DNA
agagaccggagatggaagactgggc

SEQ ID NO: 3561 - DNA, 25 bp, synthetic construct
  source 1..25: mol_type = other DNA; mol_type = other DNA
agaggccagagatggaagactgggc

SEQ ID NO: 3562 - DNA, 25 bp, synthetic construct
  source 1..25: mol_type = other DNA; mol_type = other DNA
agaggccgaagatggaagactgggc

SEQ ID NO: 3563 - DNA, 25 bp, synthetic construct
  source 1..25: mol_type = other DNA; mol_type = other DNA
aggagccggaaatggaagactgggc

SEQ ID NO: 3564 - DNA, 25 bp, synthetic construct
  source 1..25: mol_type = other DNA; mol_type = other DNA
aggagccggagatagaagactgggc

SEQ ID NO: 3565 - DNA, 25 bp, synthetic construct
  source 1..25: mol_type = other DNA; mol_type = other DNA
aggagccggagatgaaagactgggc

SEQ ID NO: 3566 - DNA, 25 bp, synthetic construct
  source 1..25: mol_type = other DNA; mol_type = other DNA
aggagccggagatggaaaactgggc

SEQ ID NO: 3567 - DNA, 25 bp, synthetic construct
  source 1..25: mol_type = other DNA; mol_type = other DNA
aggagccggagatggaagactaggc

SEQ ID NO: 3568 - DNA, 25 bp, synthetic construct
  source 1..25: mol_type = other DNA; mol_type = other DNA
aggagccggagatggaagactgagc

SEQ ID NO: 3569 - DNA, 25 bp, synthetic construct
  source 1..25: mol_type = other DNA; mol_type = other DNA
aggagccggagatggaagactggac

SEQ ID NO: 3570 - DNA, 25 bp, synthetic construct
  source 1..25: mol_type = other DNA; mol_type = other DNA
aggaaccggagatggaagactgggc

SEQ ID NO: 3571 - DNA, 25 bp, synthetic construct
  source 1..25: mol_type = other DNA; mol_type = other DNA
aggagccagagatggaagactgggc

SEQ ID NO: 3572 - DNA, 25 bp, synthetic construct
  source 1..25: mol_type = other DNA; mol_type = other DNA
aggagccgaagatggaagactgggc

SEQ ID NO: 3573 - DNA, 25 bp, synthetic construct
  source 1..25: mol_type = other DNA; mol_type = other DNA
agggaccggaaatggaagactgggc

SEQ ID NO: 3574 - DNA, 25 bp, synthetic construct
  source 1..25: mol_type = other DNA; mol_type = other DNA
agggaccggagatagaagactgggc

SEQ ID NO: 3575 - DNA, 25 bp, synthetic construct
  source 1..25: mol_type = other DNA; mol_type = other DNA
agggaccggagatgaaagactgggc

SEQ ID NO: 3576 - DNA, 25 bp, synthetic construct
  source 1..25: mol_type = other DNA; mol_type = other DNA
agggaccggagatggaaaactgggc

SEQ ID NO: 3577 - DNA, 25 bp, synthetic construct
  source 1..25: mol_type = other DNA; mol_type = other DNA
agggaccggagatggaagactaggc

SEQ ID NO: 3578 - DNA, 25 bp, synthetic construct
  source 1..25: mol_type = other DNA; mol_type = other DNA
agggaccggagatggaagactgagc

SEQ ID NO: 3579 - DNA, 25 bp, synthetic construct
  source 1..25: mol_type = other DNA; mol_type = other DNA
agggaccggagatggaagactggac

SEQ ID NO: 3580 - DNA, 25 bp, synthetic construct
  source 1..25: mol_type = other DNA; mol_type = other DNA
agggaccagagatggaagactgggc

SEQ ID NO: 3581 - DNA, 25 bp, synthetic construct
  source 1..25: mol_type = other DNA; mol_type = other DNA
agggaccgaagatggaagactgggc

SEQ ID NO: 3582 - DNA, 25 bp, synthetic construct
  source 1..25: mol_type = other DNA; mol_type = other DNA
gatgggccggagatggaagactggg

SEQ ID NO: 3583 - DNA, 25 bp, synthetic construct
  source 1..25: mol_type = other DNA; mol_type = other DNA
gagtggccggagatggaagactggg

SEQ ID NO: 3584 - DNA, 25 bp, synthetic construct
  source 1..25: mol_type = other DNA; mol_type = other DNA
gaggtgccggagatggaagactggg

SEQ ID NO: 3585 - DNA, 25 bp, synthetic construct
  source 1..25: mol_type = other DNA; mol_type = other DNA
gagggtccggagatggaagactggg

SEQ ID NO: 3586 - DNA, 25 bp, synthetic construct
  source 1..25: mol_type = other DNA; mol_type = other DNA
aaagggccggagatggaagactggg

SEQ ID NO: 3587 - DNA, 25 bp, synthetic construct
  source 1..25: mol_type = other DNA; mol_type = other DNA
aagaggccggagatggaagactggg

SEQ ID NO: 3588 - DNA, 25 bp, synthetic construct
  source 1..25: mol_type = other DNA; mol_type = other DNA
aaggagccggagatggaagactggg

SEQ ID NO: 3589 - DNA, 25 bp, synthetic construct
  source 1..25: mol_type = other DNA; mol_type = other DNA
aagggaccggagatggaagactggg

SEQ ID NO: 3590 - DNA, 25 bp, synthetic construct
  source 1..25: mol_type = other DNA; mol_type = other DNA
gaagggccgaagatggaagactggg

SEQ ID NO: 3591 - DNA, 25 bp, synthetic construct
  source 1..25: mol_type = other DNA; mol_type = other DNA
gaagggccggaaatggaagactggg

SEQ ID NO: 3592 - DNA, 25 bp, synthetic construct
  source 1..25: mol_type = other DNA; mol_type = other DNA
gaagggccggagatagaagactggg

SEQ ID NO: 3593 - DNA, 25 bp, synthetic construct
  source 1..25: mol_type = other DNA; mol_type = other DNA
gaagggccggagatgaaagactggg

SEQ ID NO: 3594 - DNA, 25 bp, synthetic construct
  source 1..25: mol_type = other DNA; mol_type = other DNA
gaagggccggagatggaaaactggg

SEQ ID NO: 3595 - DNA, 25 bp, synthetic construct
  source 1..25: mol_type = other DNA; mol_type = other DNA
gaagggccggagatggaagactagg

SEQ ID NO: 3596 - DNA, 25 bp, synthetic construct
  source 1..25: mol_type = other DNA; mol_type = other DNA
gaagggccggagatggaagactgag

SEQ ID NO: 3597 - DNA, 25 bp, synthetic construct
  source 1..25: mol_type = other DNA; mol_type = other DNA
gaagggccggagatggaagactgga

SEQ ID NO: 3598 - DNA, 25 bp, synthetic construct
  source 1..25: mol_type = other DNA; mol_type = other DNA
gaaaggccggagatggaagactggg

SEQ ID NO: 3599 - DNA, 25 bp, synthetic construct
  source 1..25: mol_type = other DNA; mol_type = other DNA
gaagagccggagatggaagactggg

SEQ ID NO: 3600 - DNA, 25 bp, synthetic construct
  source 1..25: mol_type = other DNA; mol_type = other DNA
gaaggaccggagatggaagactggg

SEQ ID NO: 3601 - DNA, 25 bp, synthetic construct
  source 1..25: mol_type = other DNA; mol_type = other DNA
gaagggccagagatggaagactggg

SEQ ID NO: 3602 - DNA, 25 bp, synthetic construct
  source 1..25: mol_type = other DNA; mol_type = other DNA
gagaggccgaagatggaagactggg

SEQ ID NO: 3603 - DNA, 25 bp, synthetic construct
  source 1..25: mol_type = other DNA; mol_type = other DNA
gagaggccggaaatggaagactggg

SEQ ID NO: 3604 - DNA, 25 bp, synthetic construct
  source 1..25: mol_type = other DNA; mol_type = other DNA
gagaggccggagatagaagactggg

SEQ ID NO: 3605 - DNA, 25 bp, synthetic construct
  source 1..25: mol_type = other DNA; mol_type = other DNA
gagaggccggagatgaaagactggg

SEQ ID NO: 3606 - DNA, 25 bp, synthetic construct
  source 1..25: mol_type = other DNA; mol_type = other DNA
gagaggccggagatggaaaactggg

SEQ ID NO: 3607 - DNA, 25 bp, synthetic construct
  source 1..25: mol_type = other DNA; mol_type = other DNA
gagaggccggagatggaagactagg

SEQ ID NO: 3608 - DNA, 25 bp, synthetic construct
  source 1..25: mol_type = other DNA; mol_type = other DNA
gagaggccggagatggaagactgag

SEQ ID NO: 3609 - DNA, 25 bp, synthetic construct
  source 1..25: mol_type = other DNA; mol_type = other DNA
gagaggccggagatggaagactgga

SEQ ID NO: 3610 - DNA, 25 bp, synthetic construct
  source 1..25: mol_type = other DNA; mol_type = other DNA
gagaagccggagatggaagactggg

SEQ ID NO: 3611 - DNA, 25 bp, synthetic construct
  source 1..25: mol_type = other DNA; mol_type = other DNA
gagagaccggagatggaagactggg

SEQ ID NO: 3612 - DNA, 25 bp, synthetic construct
  source 1..25: mol_type = other DNA; mol_type = other DNA
gagaggccagagatggaagactggg

SEQ ID NO: 3613 - DNA, 25 bp, synthetic construct
  source 1..25: mol_type = other DNA; mol_type = other DNA
gaggagccgaagatggaagactggg

SEQ ID NO: 3614 - DNA, 25 bp, synthetic construct
  source 1..25: mol_type = other DNA; mol_type = other DNA
gaggagccggaaatggaagactggg

SEQ ID NO: 3615 - DNA, 25 bp, synthetic construct
  source 1..25: mol_type = other DNA; mol_type = other DNA
gaggagccggagatagaagactggg

SEQ ID NO: 3616 - DNA, 25 bp, synthetic construct
  source 1..25: mol_type = other DNA; mol_type = other DNA
gaggagccggagatgaaagactggg

SEQ ID NO: 3617 - DNA, 25 bp, synthetic construct
  source 1..25: mol_type = other DNA; mol_type = other DNA
gaggagccggagatggaaaactggg

SEQ ID NO: 3618 - DNA, 25 bp, synthetic construct
  source 1..25: mol_type = other DNA; mol_type = other DNA
gaggagccggagatggaagactagg

SEQ ID NO: 3619 - DNA, 25 bp, synthetic construct
  source 1..25: mol_type = other DNA; mol_type = other DNA
gaggagccggagatggaagactgag

SEQ ID NO: 3620 - DNA, 25 bp, synthetic construct
  source 1..25: mol_type = other DNA; mol_type = other DNA
gaggagccggagatggaagactgga

SEQ ID NO: 3621 - DNA, 25 bp, synthetic construct
  source 1..25: mol_type = other DNA; mol_type = other DNA
gaggaaccggagatggaagactggg

SEQ ID NO: 3622 - DNA, 25 bp, synthetic construct
  source 1..25: mol_type = other DNA; mol_type = other DNA
gaggagccagagatggaagactggg

SEQ ID NO: 3623 - DNA, 25 bp, synthetic construct
  source 1..25: mol_type = other DNA; mol_type = other DNA
gagggaccgaagatggaagactggg

SEQ ID NO: 3624 - DNA, 25 bp, synthetic construct
  source 1..25: mol_type = other DNA; mol_type = other DNA
gagggaccggaaatggaagactggg

SEQ ID NO: 3625 - DNA, 25 bp, synthetic construct
  source 1..25: mol_type = other DNA; mol_type = other DNA
gagggaccggagatagaagactggg

SEQ ID NO: 3626 - DNA, 25 bp, synthetic construct
  source 1..25: mol_type = other DNA; mol_type = other DNA
gagggaccggagatgaaagactggg

SEQ ID NO: 3627 - DNA, 25 bp, synthetic construct
  source 1..25: mol_type = other DNA; mol_type = other DNA
gagggaccggagatggaaaactggg

SEQ ID NO: 3628 - DNA, 25 bp, synthetic construct
  source 1..25: mol_type = other DNA; mol_type = other DNA
gagggaccggagatggaagactagg

SEQ ID NO: 3629 - DNA, 25 bp, synthetic construct
  source 1..25: mol_type = other DNA; mol_type = other DNA
gagggaccggagatggaagactgag

SEQ ID NO: 3630 - DNA, 25 bp, synthetic construct
  source 1..25: mol_type = other DNA; mol_type = other DNA
gagggaccggagatggaagactgga

SEQ ID NO: 3631 - DNA, 25 bp, synthetic construct
  source 1..25: mol_type = other DNA; mol_type = other DNA
gagggaccagagatggaagactggg

SEQ ID NO: 3632 - DNA, 25 bp, synthetic construct
  source 1..25: mol_type = other DNA; mol_type = other DNA
tgatgggccggagatggaagactgg

SEQ ID NO: 3633 - DNA, 25 bp, synthetic construct
  source 1..25: mol_type = other DNA; mol_type = other DNA
tgagtggccggagatggaagactgg

SEQ ID NO: 3634 - DNA, 25 bp, synthetic construct
  source 1..25: mol_type = other DNA; mol_type = other DNA
tgaggtgccggagatggaagactgg

SEQ ID NO: 3635 - DNA, 25 bp, synthetic construct
  source 1..25: mol_type = other DNA; mol_type = other DNA
tgagggtccggagatggaagactgg

SEQ ID NO: 3636 - DNA, 25 bp, synthetic construct
  source 1..25: mol_type = other DNA; mol_type = other DNA
taaagggccggagatggaagactgg

SEQ ID NO: 3637 - DNA, 25 bp, synthetic construct
  source 1..25: mol_type = other DNA; mol_type = other DNA
taagaggccggagatggaagactgg

SEQ ID NO: 3638 - DNA, 25 bp, synthetic construct
  source 1..25: mol_type = other DNA; mol_type = other DNA
taaggagccggagatggaagactgg

SEQ ID NO: 3639 - DNA, 25 bp, synthetic construct
  source 1..25: mol_type = other DNA; mol_type = other DNA
taagggaccggagatggaagactgg

SEQ ID NO: 3640 - DNA, 25 bp, synthetic construct
  source 1..25: mol_type = other DNA; mol_type = other DNA
tgaagggccagagatggaagactgg

SEQ ID NO: 3641 - DNA, 25 bp, synthetic construct
  source 1..25: mol_type = other DNA; mol_type = other DNA
tgaagggccgaagatggaagactgg

SEQ ID NO: 3642 - DNA, 25 bp, synthetic construct
  source 1..25: mol_type = other DNA; mol_type = other DNA
tgaagggccggaaatggaagactgg

SEQ ID NO: 3643 - DNA, 25 bp, synthetic construct
  source 1..25: mol_type = other DNA; mol_type = other DNA
tgaagggccggagatagaagactgg

SEQ ID NO: 3644 - DNA, 25 bp, synthetic construct
  source 1..25: mol_type = other DNA; mol_type = other DNA
tgaagggccggagatgaaagactgg

SEQ ID NO: 3645 - DNA, 25 bp, synthetic construct
  source 1..25: mol_type = other DNA; mol_type = other DNA
tgaagggccggagatggaaaactgg

SEQ ID NO: 3646 - DNA, 25 bp, synthetic construct
  source 1..25: mol_type = other DNA; mol_type = other DNA
tgaagggccggagatggaagactag

SEQ ID NO: 3647 - DNA, 25 bp, synthetic construct
  source 1..25: mol_type = other DNA; mol_type = other DNA
tgaagggccggagatggaagactga

SEQ ID NO: 3648 - DNA, 25 bp, synthetic construct
  source 1..25: mol_type = other DNA; mol_type = other DNA
tgaaaggccggagatggaagactgg

SEQ ID NO: 3649 - DNA, 25 bp, synthetic construct
  source 1..25: mol_type = other DNA; mol_type = other DNA
tgaagagccggagatggaagactgg

SEQ ID NO: 3650 - DNA, 25 bp, synthetic construct
  source 1..25: mol_type = other DNA; mol_type = other DNA
tgaaggaccggagatggaagactgg

SEQ ID NO: 3651 - DNA, 25 bp, synthetic construct
  source 1..25: mol_type = other DNA; mol_type = other DNA
tgagaggccagagatggaagactgg

SEQ ID NO: 3652 - DNA, 25 bp, synthetic construct
  source 1..25: mol_type = other DNA; mol_type = other DNA
tgagaggccgaagatggaagactgg

SEQ ID NO: 3653 - DNA, 25 bp, synthetic construct
  source 1..25: mol_type = other DNA; mol_type = other DNA
tgagaggccggaaatggaagactgg

SEQ ID NO: 3654 - DNA, 25 bp, synthetic construct
  source 1..25: mol_type = other DNA; mol_type = other DNA
tgagaggccggagatagaagactgg

SEQ ID NO: 3655 - DNA, 25 bp, synthetic construct
  source 1..25: mol_type = other DNA; mol_type = other DNA
tgagaggccggagatgaaagactgg

SEQ ID NO: 3656 - DNA, 25 bp, synthetic construct
  source 1..25: mol_type = other DNA; mol_type = other DNA
tgagaggccggagatggaaaactgg

SEQ ID NO: 3657 - DNA, 25 bp, synthetic construct
  source 1..25: mol_type = other DNA; mol_type = other DNA
tgagaggccggagatggaagactag

SEQ ID NO: 3658 - DNA, 25 bp, synthetic construct
  source 1..25: mol_type = other DNA; mol_type = other DNA
tgagaggccggagatggaagactga

SEQ ID NO: 3659 - DNA, 25 bp, synthetic construct
  source 1..25: mol_type = other DNA; mol_type = other DNA
tgagaagccggagatggaagactgg

SEQ ID NO: 3660 - DNA, 25 bp, synthetic construct
  source 1..25: mol_type = other DNA; mol_type = other DNA
tgagagaccggagatggaagactgg

SEQ ID NO: 3661 - DNA, 25 bp, synthetic construct
  source 1..25: mol_type = other DNA; mol_type = other DNA
tgaggagccagagatggaagactgg

SEQ ID NO: 3662 - DNA, 25 bp, synthetic construct
  source 1..25: mol_type = other DNA; mol_type = other DNA
tgaggagccgaagatggaagactgg

SEQ ID NO: 3663 - DNA, 25 bp, synthetic construct
  source 1..25: mol_type = other DNA; mol_type = other DNA
tgaggagccggaaatggaagactgg

SEQ ID NO: 3664 - DNA, 25 bp, synthetic construct
  source 1..25: mol_type = other DNA; mol_type = other DNA
tgaggagccggagatagaagactgg

SEQ ID NO: 3665 - DNA, 25 bp, synthetic construct
  source 1..25: mol_type = other DNA; mol_type = other DNA
tgaggagccggagatgaaagactgg

SEQ ID NO: 3666 - DNA, 25 bp, synthetic construct
  source 1..25: mol_type = other DNA; mol_type = other DNA
tgaggagccggagatggaaaactgg

SEQ ID NO: 3667 - DNA, 25 bp, synthetic construct
  source 1..25: mol_type = other DNA; mol_type = other DNA
tgaggagccggagatggaagactag

SEQ ID NO: 3668 - DNA, 25 bp, synthetic construct
  source 1..25: mol_type = other DNA; mol_type = other DNA
tgaggagccggagatggaagactga

SEQ ID NO: 3669 - DNA, 25 bp, synthetic construct
  source 1..25: mol_type = other DNA; mol_type = other DNA
tgaggaaccggagatggaagactgg

SEQ ID NO: 3670 - DNA, 25 bp, synthetic construct
  source 1..25: mol_type = other DNA; mol_type = other DNA
tgagggaccagagatggaagactgg

SEQ ID NO: 3671 - DNA, 25 bp, synthetic construct
  source 1..25: mol_type = other DNA; mol_type = other DNA
tgagggaccgaagatggaagactgg

SEQ ID NO: 3672 - DNA, 25 bp, synthetic construct
  source 1..25: mol_type = other DNA; mol_type = other DNA
tgagggaccggaaatggaagactgg

SEQ ID NO: 3673 - DNA, 25 bp, synthetic construct
  source 1..25: mol_type = other DNA; mol_type = other DNA
tgagggaccggagatagaagactgg

SEQ ID NO: 3674 - DNA, 25 bp, synthetic construct
  source 1..25: mol_type = other DNA; mol_type = other DNA
tgagggaccggagatgaaagactgg

SEQ ID NO: 3675 - DNA, 25 bp, synthetic construct
  source 1..25: mol_type = other DNA; mol_type = other DNA
tgagggaccggagatggaaaactgg

SEQ ID NO: 3676 - DNA, 25 bp, synthetic construct
  source 1..25: mol_type = other DNA; mol_type = other DNA
tgagggaccggagatggaagactag

SEQ ID NO: 3677 - DNA, 25 bp, synthetic construct
  source 1..25: mol_type = other DNA; mol_type = other DNA
tgagggaccggagatggaagactga

SEQ ID NO: 3678 - DNA, 25 bp, synthetic construct
  source 1..25: mol_type = other DNA; mol_type = other DNA
gtgatgggccggagatggaagactg

SEQ ID NO: 3679 - DNA, 25 bp, synthetic construct
  source 1..25: mol_type = other DNA; mol_type = other DNA
gtgagtggccggagatggaagactg

SEQ ID NO: 3680 - DNA, 25 bp, synthetic construct
  source 1..25: mol_type = other DNA; mol_type = other DNA
gtgagggtccggagatggaagactg

SEQ ID NO: 3681 - DNA, 25 bp, synthetic construct
  source 1..25: mol_type = other DNA; mol_type = other DNA
atgaagggccggagatggaagactg

SEQ ID NO: 3682 - DNA, 25 bp, synthetic construct
  source 1..25: mol_type = other DNA; mol_type = other DNA
atgagaggccggagatggaagactg

SEQ ID NO: 3683 - DNA, 25 bp, synthetic construct
  source 1..25: mol_type = other DNA; mol_type = other DNA
atgaggagccggagatggaagactg

SEQ ID NO: 3684 - DNA, 25 bp, synthetic construct
  source 1..25: mol_type = other DNA; mol_type = other DNA
atgagggaccggagatggaagactg

SEQ ID NO: 3685 - DNA, 25 bp, synthetic construct
  source 1..25: mol_type = other DNA; mol_type = other DNA
gtaaagggccggagatggaagactg

SEQ ID NO: 3686 - DNA, 25 bp, synthetic construct
  source 1..25: mol_type = other DNA; mol_type = other DNA
gtaagaggccggagatggaagactg

SEQ ID NO: 3687 - DNA, 25 bp, synthetic construct
  source 1..25: mol_type = other DNA; mol_type = other DNA
gtaaggagccggagatggaagactg

SEQ ID NO: 3688 - DNA, 25 bp, synthetic construct
  source 1..25: mol_type = other DNA; mol_type = other DNA
gtaagggaccggagatggaagactg

SEQ ID NO: 3689 - DNA, 25 bp, synthetic construct
  source 1..25: mol_type = other DNA; mol_type = other DNA
gtgaagggccagagatggaagactg

SEQ ID NO: 3690 - DNA, 25 bp, synthetic construct
  source 1..25: mol_type = other DNA; mol_type = other DNA
gtgaagggccgaagatggaagactg

SEQ ID NO: 3691 - DNA, 25 bp, synthetic construct
  source 1..25: mol_type = other DNA; mol_type = other DNA
gtgaagggccggaaatggaagactg

SEQ ID NO: 3692 - DNA, 25 bp, synthetic construct
  source 1..25: mol_type = other DNA; mol_type = other DNA
gtgaagggccggagatagaagactg

SEQ ID NO: 3693 - DNA, 25 bp, synthetic construct
  source 1..25: mol_type = other DNA; mol_type = other DNA
gtgaagggccggagatgaaagactg

SEQ ID NO: 3694 - DNA, 25 bp, synthetic construct
  source 1..25: mol_type = other DNA; mol_type = other DNA
gtgaagggccggagatggaaaactg

SEQ ID NO: 3695 - DNA, 25 bp, synthetic construct
  source 1..25: mol_type = other DNA; mol_type = other DNA
gtgaagggccggagatggaagacta

SEQ ID NO: 3696 - DNA, 25 bp, synthetic construct
  source 1..25: mol_type = other DNA; mol_type = other DNA
gtgaaaggccggagatggaagactg

SEQ ID NO: 3697 - DNA, 25 bp, synthetic construct
  source 1..25: mol_type = other DNA; mol_type = other DNA
gtgaagagccggagatggaagactg

SEQ ID NO: 3698 - DNA, 25 bp, synthetic construct
  source 1..25: mol_type = other DNA; mol_type = other DNA
gtgaaggaccggagatggaagactg

SEQ ID NO: 3699 - DNA, 25 bp, synthetic construct
  source 1..25: mol_type = other DNA; mol_type = other DNA
gtgagaggccagagatggaagactg

SEQ ID NO: 3700 - DNA, 25 bp, synthetic construct
  source 1..25: mol_type = other DNA; mol_type = other DNA
gtgagaggccgaagatggaagactg

SEQ ID NO: 3701 - DNA, 25 bp, synthetic construct
  source 1..25: mol_type = other DNA; mol_type = other DNA
gtgagaggccggaaatggaagactg

SEQ ID NO: 3702 - DNA, 25 bp, synthetic construct
  source 1..25: mol_type = other DNA; mol_type = other DNA
gtgagaggccggagatagaagactg

SEQ ID NO: 3703 - DNA, 25 bp, synthetic construct
  source 1..25: mol_type = other DNA; mol_type = other DNA
gtgagaggccggagatgaaagactg

SEQ ID NO: 3704 - DNA, 25 bp, synthetic construct
  source 1..25: mol_type = other DNA; mol_type = other DNA
gtgagaggccggagatggaaaactg

SEQ ID NO: 3705 - DNA, 25 bp, synthetic construct
  source 1..25: mol_type = other DNA; mol_type = other DNA
gtgagaggccggagatggaagacta

SEQ ID NO: 3706 - DNA, 25 bp, synthetic construct
  source 1..25: mol_type = other DNA; mol_type = other DNA
gtgagaagccggagatggaagactg

SEQ ID NO: 3707 - DNA, 25 bp, synthetic construct
  source 1..25: mol_type = other DNA; mol_type = other DNA
gtgagagaccggagatggaagactg

SEQ ID NO: 3708 - DNA, 25 bp, synthetic construct
  source 1..25: mol_type = other DNA; mol_type = other DNA
gtgaggagccagagatggaagactg

SEQ ID NO: 3709 - DNA, 25 bp, synthetic construct
  source 1..25: mol_type = other DNA; mol_type = other DNA
gtgaggagccgaagatggaagactg

SEQ ID NO: 3710 - DNA, 25 bp, synthetic construct
  source 1..25: mol_type = other DNA; mol_type = other DNA
gtgaggagccggaaatggaagactg

SEQ ID NO: 3711 - DNA, 25 bp, synthetic construct
  source 1..25: mol_type = other DNA; mol_type = other DNA
gtgaggagccggagatagaagactg

SEQ ID NO: 3712 - DNA, 25 bp, synthetic construct
  source 1..25: mol_type = other DNA; mol_type = other DNA
gtgaggagccggagatgaaagactg

SEQ ID NO: 3713 - DNA, 25 bp, synthetic construct
  source 1..25: mol_type = other DNA; mol_type = other DNA
gtgaggagccggagatggaaaactg

SEQ ID NO: 3714 - DNA, 25 bp, synthetic construct
  source 1..25: mol_type = other DNA; mol_type = other DNA
gtgaggagccggagatggaagacta

SEQ ID NO: 3715 - DNA, 25 bp, synthetic construct
  source 1..25: mol_type = other DNA; mol_type = other DNA
gtgaggaaccggagatggaagactg

SEQ ID NO: 3716 - DNA, 25 bp, synthetic construct
  source 1..25: mol_type = other DNA; mol_type = other DNA
gtgagggaccagagatggaagactg

SEQ ID NO: 3717 - DNA, 25 bp, synthetic construct
  source 1..25: mol_type = other DNA; mol_type = other DNA
gtgagggaccgaagatggaagactg

SEQ ID NO: 3718 - DNA, 25 bp, synthetic construct
  source 1..25: mol_type = other DNA; mol_type = other DNA
gtgagggaccggaaatggaagactg

SEQ ID NO: 3719 - DNA, 25 bp, synthetic construct
  source 1..25: mol_type = other DNA; mol_type = other DNA
gtgagggaccggagatagaagactg

SEQ ID NO: 3720 - DNA, 25 bp, synthetic construct
  source 1..25: mol_type = other DNA; mol_type = other DNA
gtgagggaccggagatgaaagactg

SEQ ID NO: 3721 - DNA, 25 bp, synthetic construct
  source 1..25: mol_type = other DNA; mol_type = other DNA
gtgagggaccggagatggaaaactg

SEQ ID NO: 3722 - DNA, 25 bp, synthetic construct
  source 1..25: mol_type = other DNA; mol_type = other DNA
gtgagggaccggagatggaagacta

SEQ ID NO: 3723 - DNA, 25 bp, synthetic construct
  source 1..25: mol_type = other DNA; mol_type = other DNA
agtgatgggccggagatggaagact

SEQ ID NO: 3724 - DNA, 25 bp, synthetic construct
  source 1..25: mol_type = other DNA; mol_type = other DNA
agtgagtggccggagatggaagact

SEQ ID NO: 3725 - DNA, 25 bp, synthetic construct
  source 1..25: mol_type = other DNA; mol_type = other DNA
agtgaggtgccggagatggaagact

SEQ ID NO: 3726 - DNA, 25 bp, synthetic construct
  source 1..25: mol_type = other DNA; mol_type = other DNA
agtgagggtccggagatggaagact

SEQ ID NO: 3727 - DNA, 25 bp, synthetic construct
  source 1..25: mol_type = other DNA; mol_type = other DNA
aatgaagggccggagatggaagact

SEQ ID NO: 3728 - DNA, 25 bp, synthetic construct
  source 1..25: mol_type = other DNA; mol_type = other DNA
aatgagaggccggagatggaagact

SEQ ID NO: 3729 - DNA, 25 bp, synthetic construct
  source 1..25: mol_type = other DNA; mol_type = other DNA
aatgaggagccggagatggaagact

SEQ ID NO: 3730 - DNA, 25 bp, synthetic construct
  source 1..25: mol_type = other DNA; mol_type = other DNA
aatgagggaccggagatggaagact

SEQ ID NO: 3731 - DNA, 25 bp, synthetic construct
  source 1..25: mol_type = other DNA; mol_type = other DNA
agtaaagggccggagatggaagact

SEQ ID NO: 3732 - DNA, 25 bp, synthetic construct
  source 1..25: mol_type = other DNA; mol_type = other DNA
agtaagaggccggagatggaagact

SEQ ID NO: 3733 - DNA, 25 bp, synthetic construct
  source 1..25: mol_type = other DNA; mol_type = other DNA
agtaaggagccggagatggaagact

SEQ ID NO: 3734 - DNA, 25 bp, synthetic construct
  source 1..25: mol_type = other DNA; mol_type = other DNA
agtaagggaccggagatggaagact

SEQ ID NO: 3735 - DNA, 25 bp, synthetic construct
  source 1..25: mol_type = other DNA; mol_type = other DNA
agtgaagggccagagatggaagact

SEQ ID NO: 3736 - DNA, 25 bp, synthetic construct
  source 1..25: mol_type = other DNA; mol_type = other DNA
agtgaagggccgaagatggaagact

SEQ ID NO: 3737 - DNA, 25 bp, synthetic construct
  source 1..25: mol_type = other DNA; mol_type = other DNA
agtgaagggccggaaatggaagact

SEQ ID NO: 3738 - DNA, 25 bp, synthetic construct
  source 1..25: mol_type = other DNA; mol_type = other DNA
agtgaagggccggagatagaagact

SEQ ID NO: 3739 - DNA, 25 bp, synthetic construct
  source 1..25: mol_type = other DNA; mol_type = other DNA
agtgaagggccggagatgaaagact

SEQ ID NO: 3740 - DNA, 25 bp, synthetic construct
  source 1..25: mol_type = other DNA; mol_type = other DNA
agtgaagggccggagatggaaaact

SEQ ID NO: 3741 - DNA, 25 bp, synthetic construct
  source 1..25: mol_type = other DNA; mol_type = other DNA
agtgaaaggccggagatggaagact

SEQ ID NO: 3742 - DNA, 25 bp, synthetic construct
  source 1..25: mol_type = other DNA; mol_type = other DNA
agtgaagagccggagatggaagact

SEQ ID NO: 3743 - DNA, 25 bp, synthetic construct
  source 1..25: mol_type = other DNA; mol_type = other DNA
agtgaaggaccggagatggaagact

SEQ ID NO: 3744 - DNA, 25 bp, synthetic construct
  source 1..25: mol_type = other DNA; mol_type = other DNA
agtgagaggccagagatggaagact

SEQ ID NO: 3745 - DNA, 25 bp, synthetic construct
  source 1..25: mol_type = other DNA; mol_type = other DNA
agtgagaggccgaagatggaagact

SEQ ID NO: 3746 - DNA, 25 bp, synthetic construct
  source 1..25: mol_type = other DNA; mol_type = other DNA
agtgagaggccggaaatggaagact

SEQ ID NO: 3747 - DNA, 25 bp, synthetic construct
  source 1..25: mol_type = other DNA; mol_type = other DNA
agtgagaggccggagatagaagact

SEQ ID NO: 3748 - DNA, 25 bp, synthetic construct
  source 1..25: mol_type = other DNA; mol_type = other DNA
agtgagaggccggagatgaaagact

SEQ ID NO: 3749 - DNA, 25 bp, synthetic construct
  source 1..25: mol_type = other DNA; mol_type = other DNA
agtgagaggccggagatggaaaact

SEQ ID NO: 3750 - DNA, 25 bp, synthetic construct
  source 1..25: mol_type = other DNA; mol_type = other DNA
agtgagaagccggagatggaagact

SEQ ID NO: 3751 - DNA, 25 bp, synthetic construct
  source 1..25: mol_type = other DNA; mol_type = other DNA
agtgagagaccggagatggaagact

SEQ ID NO: 3752 - DNA, 25 bp, synthetic construct
  source 1..25: mol_type = other DNA; mol_type = other DNA
agtgaggagccagagatggaagact

SEQ ID NO: 3753 - DNA, 25 bp, synthetic construct
  source 1..25: mol_type = other DNA; mol_type = other DNA
agtgaggagccgaagatggaagact

SEQ ID NO: 3754 - DNA, 25 bp, synthetic construct
  source 1..25: mol_type = other DNA; mol_type = other DNA
agtgaggagccggaaatggaagact

SEQ ID NO: 3755 - DNA, 25 bp, synthetic construct
  source 1..25: mol_type = other DNA; mol_type = other DNA
agtgaggagccggagatagaagact

SEQ ID NO: 3756 - DNA, 25 bp, synthetic construct
  source 1..25: mol_type = other DNA; mol_type = other DNA
agtgaggagccggagatgaaagact

SEQ ID NO: 3757 - DNA, 25 bp, synthetic construct
  source 1..25: mol_type = other DNA; mol_type = other DNA
agtgaggagccggagatggaaaact

SEQ ID NO: 3758 - DNA, 25 bp, synthetic construct
  source 1..25: mol_type = other DNA; mol_type = other DNA
agtgaggaaccggagatggaagact

SEQ ID NO: 3759 - DNA, 25 bp, synthetic construct
  source 1..25: mol_type = other DNA; mol_type = other DNA
agtgagggaccagagatggaagact

SEQ ID NO: 3760 - DNA, 25 bp, synthetic construct
  source 1..25: mol_type = other DNA; mol_type = other DNA
agtgagggaccgaagatggaagact

SEQ ID NO: 3761 - DNA, 25 bp, synthetic construct
  source 1..25: mol_type = other DNA; mol_type = other DNA
agtgagggaccggaaatggaagact

SEQ ID NO: 3762 - DNA, 25 bp, synthetic construct
  source 1..25: mol_type = other DNA; mol_type = other DNA
agtgagggaccggagatagaagact

SEQ ID NO: 3763 - DNA, 25 bp, synthetic construct
  source 1..25: mol_type = other DNA; mol_type = other DNA
agtgagggaccggagatgaaagact

SEQ ID NO: 3764 - DNA, 25 bp, synthetic construct
  source 1..25: mol_type = other DNA; mol_type = other DNA
agtgagggaccggagatggaaaact

SEQ ID NO: 3765 - DNA, 25 bp, synthetic construct
  source 1..25: mol_type = other DNA; mol_type = other DNA
cagtgagggtccggagatggaagac

SEQ ID NO: 3766 - DNA, 25 bp, synthetic construct
  source 1..25: mol_type = other DNA; mol_type = other DNA
cagtgatgggccggagatggaagac

SEQ ID NO: 3767 - DNA, 25 bp, synthetic construct
  source 1..25: mol_type = other DNA; mol_type = other DNA
cagtgagtggccggagatggaagac

SEQ ID NO: 3768 - DNA, 25 bp, synthetic construct
  source 1..25: mol_type = other DNA; mol_type = other DNA
cagtgaggtgccggagatggaagac

SEQ ID NO: 3769 - DNA, 25 bp, synthetic construct
  source 1..25: mol_type = other DNA; mol_type = other DNA
cagtgagggaccagagatggaagac

SEQ ID NO: 3770 - DNA, 25 bp, synthetic construct
  source 1..25: mol_type = other DNA; mol_type = other DNA
cagtgagggaccgaagatggaagac

SEQ ID NO: 3771 - DNA, 25 bp, synthetic construct
  source 1..25: mol_type = other DNA; mol_type = other DNA
cagtgagggaccggaaatggaagac

SEQ ID NO: 3772 - DNA, 25 bp, synthetic construct
  source 1..25: mol_type = other DNA; mol_type = other DNA
cagtgagggaccggagatagaagac

SEQ ID NO: 3773 - DNA, 25 bp, synthetic construct
  source 1..25: mol_type = other DNA; mol_type = other DNA
cagtgagggaccggagatgaaagac

SEQ ID NO: 3774 - DNA, 25 bp, synthetic construct
  source 1..25: mol_type = other DNA; mol_type = other DNA
cagtgagggaccggagatggaaaac

SEQ ID NO: 3775 - DNA, 25 bp, synthetic construct
  source 1..25: mol_type = other DNA; mol_type = other DNA
caatgagggaccggagatggaagac

SEQ ID NO: 3776 - DNA, 25 bp, synthetic construct
  source 1..25: mol_type = other DNA; mol_type = other DNA
caatgaagggccggagatggaagac

SEQ ID NO: 3777 - DNA, 25 bp, synthetic construct
  source 1..25: mol_type = other DNA; mol_type = other DNA
caatgagaggccggagatggaagac

SEQ ID NO: 3778 - DNA, 25 bp, synthetic construct
  source 1..25: mol_type = other DNA; mol_type = other DNA
caatgaggagccggagatggaagac

SEQ ID NO: 3779 - DNA, 25 bp, synthetic construct
  source 1..25: mol_type = other DNA; mol_type = other DNA
cagtaagggaccggagatggaagac

SEQ ID NO: 3780 - DNA, 25 bp, synthetic construct
  source 1..25: mol_type = other DNA; mol_type = other DNA
cagtaaagggccggagatggaagac

SEQ ID NO: 3781 - DNA, 25 bp, synthetic construct
  source 1..25: mol_type = other DNA; mol_type = other DNA
cagtaagaggccggagatggaagac

SEQ ID NO: 3782 - DNA, 25 bp, synthetic construct
  source 1..25: mol_type = other DNA; mol_type = other DNA
cagtaaggagccggagatggaagac

SEQ ID NO: 3783 - DNA, 25 bp, synthetic construct
  source 1..25: mol_type = other DNA; mol_type = other DNA
cagtgaaggaccggagatggaagac

SEQ ID NO: 3784 - DNA, 25 bp, synthetic construct
  source 1..25: mol_type = other DNA; mol_type = other DNA
cagtgaagggccagagatggaagac

SEQ ID NO: 3785 - DNA, 25 bp, synthetic construct
  source 1..25: mol_type = other DNA; mol_type = other DNA
cagtgaagggccgaagatggaagac

SEQ ID NO: 3786 - DNA, 25 bp, synthetic construct
  source 1..25: mol_type = other DNA; mol_type = other DNA
cagtgaagggccggaaatggaagac

SEQ ID NO: 3787 - DNA, 25 bp, synthetic construct
  source 1..25: mol_type = other DNA; mol_type = other DNA
cagtgaagggccggagatagaagac

SEQ ID NO: 3788 - DNA, 25 bp, synthetic construct
  source 1..25: mol_type = other DNA; mol_type = other DNA
cagtgaagggccggagatgaaagac

SEQ ID NO: 3789 - DNA, 25 bp, synthetic construct
  source 1..25: mol_type = other DNA; mol_type = other DNA
cagtgaagggccggagatggaaaac

SEQ ID NO: 3790 - DNA, 25 bp, synthetic construct
  source 1..25: mol_type = other DNA; mol_type = other DNA
cagtgaaaggccggagatggaagac

SEQ ID NO: 3791 - DNA, 25 bp, synthetic construct
  source 1..25: mol_type = other DNA; mol_type = other DNA
cagtgaagagccggagatggaagac

SEQ ID NO: 3792 - DNA, 25 bp, synthetic construct
  source 1..25: mol_type = other DNA; mol_type = other DNA
cagtgagagaccggagatggaagac

SEQ ID NO: 3793 - DNA, 25 bp, synthetic construct
  source 1..25: mol_type = other DNA; mol_type = other DNA
cagtgagaggccagagatggaagac

SEQ ID NO: 3794 - DNA, 25 bp, synthetic construct
  source 1..25: mol_type = other DNA; mol_type = other DNA
cagtgagaggccgaagatggaagac

SEQ ID NO: 3795 - DNA, 25 bp, synthetic construct
  source 1..25: mol_type = other DNA; mol_type = other DNA
cagtgagaggccggaaatggaagac

SEQ ID NO: 3796 - DNA, 25 bp, synthetic construct
  source 1..25: mol_type = other DNA; mol_type = other DNA
cagtgagaggccggagatagaagac

SEQ ID NO: 3797 - DNA, 25 bp, synthetic construct
  source 1..25: mol_type = other DNA; mol_type = other DNA
cagtgagaggccggagatgaaagac

SEQ ID NO: 3798 - DNA, 25 bp, synthetic construct
  source 1..25: mol_type = other DNA; mol_type = other DNA
cagtgagaggccggagatggaaaac

SEQ ID NO: 3799 - DNA, 25 bp, synthetic construct
  source 1..25: mol_type = other DNA; mol_type = other DNA
cagtgagaagccggagatggaagac

SEQ ID NO: 3800 - DNA, 25 bp, synthetic construct
  source 1..25: mol_type = other DNA; mol_type = other DNA
cagtgaggaaccggagatggaagac

SEQ ID NO: 3801 - DNA, 25 bp, synthetic construct
  source 1..25: mol_type = other DNA; mol_type = other DNA
cagtgaggagccagagatggaagac

SEQ ID NO: 3802 - DNA, 25 bp, synthetic construct
  source 1..25: mol_type = other DNA; mol_type = other DNA
cagtgaggagccgaagatggaagac

SEQ ID NO: 3803 - DNA, 25 bp, synthetic construct
  source 1..25: mol_type = other DNA; mol_type = other DNA
cagtgaggagccggaaatggaagac

SEQ ID NO: 3804 - DNA, 25 bp, synthetic construct
  source 1..25: mol_type = other DNA; mol_type = other DNA
cagtgaggagccggagatagaagac

SEQ ID NO: 3805 - DNA, 25 bp, synthetic construct
  source 1..25: mol_type = other DNA; mol_type = other DNA
cagtgaggagccggagatgaaagac

SEQ ID NO: 3806 - DNA, 25 bp, synthetic construct
  source 1..25: mol_type = other DNA; mol_type = other DNA
cagtgaggagccggagatggaaaac

SEQ ID NO: 3807 - DNA, 25 bp, synthetic construct
  source 1..25: mol_type = other DNA; mol_type = other DNA
gcagtgaggtgccggagatggaaga

SEQ ID NO: 3808 - DNA, 25 bp, synthetic construct
  source 1..25: mol_type = other DNA; mol_type = other DNA
gcagtgatgggccggagatggaaga

SEQ ID NO: 3809 - DNA, 25 bp, synthetic construct
  source 1..25: mol_type = other DNA; mol_type = other DNA
gcagtgagtggccggagatggaaga

SEQ ID NO: 3810 - DNA, 25 bp, synthetic construct
  source 1..25: mol_type = other DNA; mol_type = other DNA
acagtgaggagccggagatggaaga

SEQ ID NO: 3811 - DNA, 25 bp, synthetic construct
  source 1..25: mol_type = other DNA; mol_type = other DNA
acagtgagggaccggagatggaaga

SEQ ID NO: 3812 - DNA, 25 bp, synthetic construct
  source 1..25: mol_type = other DNA; mol_type = other DNA
acagtgaagggccggagatggaaga

SEQ ID NO: 3813 - DNA, 25 bp, synthetic construct
  source 1..25: mol_type = other DNA; mol_type = other DNA
acagtgagaggccggagatggaaga

SEQ ID NO: 3814 - DNA, 25 bp, synthetic construct
  source 1..25: mol_type = other DNA; mol_type = other DNA
gcagtgaggaaccggagatggaaga

SEQ ID NO: 3815 - DNA, 25 bp, synthetic construct
  source 1..25: mol_type = other DNA; mol_type = other DNA
gcagtgaggagccagagatggaaga

SEQ ID NO: 3816 - DNA, 25 bp, synthetic construct
  source 1..25: mol_type = other DNA; mol_type = other DNA
gcagtgaggagccgaagatggaaga

SEQ ID NO: 3817 - DNA, 25 bp, synthetic construct
  source 1..25: mol_type = other DNA; mol_type = other DNA
gcagtgaggagccggaaatggaaga

SEQ ID NO: 3818 - DNA, 25 bp, synthetic construct
  source 1..25: mol_type = other DNA; mol_type = other DNA
gcagtgaggagccggagatagaaga

SEQ ID NO: 3819 - DNA, 25 bp, synthetic construct
  source 1..25: mol_type = other DNA; mol_type = other DNA
gcagtgaggagccggagatgaaaga

SEQ ID NO: 3820 - DNA, 25 bp, synthetic construct
  source 1..25: mol_type = other DNA; mol_type = other DNA
gcagtgaggagccggagatggaaaa

SEQ ID NO: 3821 - DNA, 25 bp, synthetic construct
  source 1..25: mol_type = other DNA; mol_type = other DNA
gcagtgagggaccagagatggaaga

SEQ ID NO: 3822 - DNA, 25 bp, synthetic construct
  source 1..25: mol_type = other DNA; mol_type = other DNA
gcagtgagggaccgaagatggaaga

SEQ ID NO: 3823 - DNA, 25 bp, synthetic construct
  source 1..25: mol_type = other DNA; mol_type = other DNA
gcagtgagggaccggaaatggaaga

SEQ ID NO: 3824 - DNA, 25 bp, synthetic construct
  source 1..25: mol_type = other DNA; mol_type = other DNA
gcagtgagggaccggagatagaaga

SEQ ID NO: 3825 - DNA, 25 bp, synthetic construct
  source 1..25: mol_type = other DNA; mol_type = other DNA
gcagtgagggaccggagatgaaaga

SEQ ID NO: 3826 - DNA, 25 bp, synthetic construct
  source 1..25: mol_type = other DNA; mol_type = other DNA
gcagtgagggaccggagatggaaaa

SEQ ID NO: 3827 - DNA, 25 bp, synthetic construct
  source 1..25: mol_type = other DNA; mol_type = other DNA
gcaatgaggagccggagatggaaga

SEQ ID NO: 3828 - DNA, 25 bp, synthetic construct
  source 1..25: mol_type = other DNA; mol_type = other DNA
gcaatgagggaccggagatggaaga

SEQ ID NO: 3829 - DNA, 25 bp, synthetic construct
  source 1..25: mol_type = other DNA; mol_type = other DNA
gcaatgaagggccggagatggaaga

SEQ ID NO: 3830 - DNA, 25 bp, synthetic construct
  source 1..25: mol_type = other DNA; mol_type = other DNA
gcaatgagaggccggagatggaaga

SEQ ID NO: 3831 - DNA, 25 bp, synthetic construct
  source 1..25: mol_type = other DNA; mol_type = other DNA
gcagtaaggagccggagatggaaga

SEQ ID NO: 3832 - DNA, 25 bp, synthetic construct
  source 1..25: mol_type = other DNA; mol_type = other DNA
gcagtaagggaccggagatggaaga

SEQ ID NO: 3833 - DNA, 25 bp, synthetic construct
  source 1..25: mol_type = other DNA; mol_type = other DNA
gcagtaaagggccggagatggaaga

SEQ ID NO: 3834 - DNA, 25 bp, synthetic construct
  source 1..25: mol_type = other DNA; mol_type = other DNA
gcagtaagaggccggagatggaaga

SEQ ID NO: 3835 - DNA, 25 bp, synthetic construct
  source 1..25: mol_type = other DNA; mol_type = other DNA
gcagtgaagagccggagatggaaga

SEQ ID NO: 3836 - DNA, 25 bp, synthetic construct
  source 1..25: mol_type = other DNA; mol_type = other DNA
gcagtgaaggaccggagatggaaga

SEQ ID NO: 3837 - DNA, 25 bp, synthetic construct
  source 1..25: mol_type = other DNA; mol_type = other DNA
gcagtgaagggccagagatggaaga

SEQ ID NO: 3838 - DNA, 25 bp, synthetic construct
  source 1..25: mol_type = other DNA; mol_type = other DNA
gcagtgaagggccgaagatggaaga

SEQ ID NO: 3839 - DNA, 25 bp, synthetic construct
  source 1..25: mol_type = other DNA; mol_type = other DNA
gcagtgaagggccggaaatggaaga

SEQ ID NO: 3840 - DNA, 25 bp, synthetic construct
  source 1..25: mol_type = other DNA; mol_type = other DNA
gcagtgaagggccggagatagaaga

SEQ ID NO: 3841 - DNA, 25 bp, synthetic construct
  source 1..25: mol_type = other DNA; mol_type = other DNA
gcagtgaagggccggagatgaaaga

SEQ ID NO: 3842 - DNA, 25 bp, synthetic construct
  source 1..25: mol_type = other DNA; mol_type = other DNA
gcagtgaagggccggagatggaaaa

SEQ ID NO: 3843 - DNA, 25 bp, synthetic construct
  source 1..25: mol_type = other DNA; mol_type = other DNA
gcagtgaaaggccggagatggaaga

SEQ ID NO: 3844 - DNA, 25 bp, synthetic construct
  source 1..25: mol_type = other DNA; mol_type = other DNA
gcagtgagaagccggagatggaaga

SEQ ID NO: 3845 - DNA, 25 bp, synthetic construct
  source 1..25: mol_type = other DNA; mol_type = other DNA
gcagtgagagaccggagatggaaga

SEQ ID NO: 3846 - DNA, 25 bp, synthetic construct
  source 1..25: mol_type = other DNA; mol_type = other DNA
gcagtgagaggccagagatggaaga

SEQ ID NO: 3847 - DNA, 25 bp, synthetic construct
  source 1..25: mol_type = other DNA; mol_type = other DNA
gcagtgagaggccgaagatggaaga

SEQ ID NO: 3848 - DNA, 25 bp, synthetic construct
  source 1..25: mol_type = other DNA; mol_type = other DNA
gcagtgagaggccggaaatggaaga

SEQ ID NO: 3849 - DNA, 25 bp, synthetic construct
  source 1..25: mol_type = other DNA; mol_type = other DNA
gcagtgagaggccggagatagaaga

SEQ ID NO: 3850 - DNA, 25 bp, synthetic construct
  source 1..25: mol_type = other DNA; mol_type = other DNA
gcagtgagaggccggagatgaaaga

SEQ ID NO: 3851 - DNA, 25 bp, synthetic construct
  source 1..25: mol_type = other DNA; mol_type = other DNA
gcagtgagaggccggagatggaaaa

SEQ ID NO: 3852 - DNA, 25 bp, synthetic construct
  source 1..25: mol_type = other DNA; mol_type = other DNA
ggcagtgagtggccggagatggaag

SEQ ID NO: 3853 - DNA, 25 bp, synthetic construct
  source 1..25: mol_type = other DNA; mol_type = other DNA
ggcagtgaggtgccggagatggaag

SEQ ID NO: 3854 - DNA, 25 bp, synthetic construct
  source 1..25: mol_type = other DNA; mol_type = other DNA
ggcagtgagggtccggagatggaag

SEQ ID NO: 3855 - DNA, 25 bp, synthetic construct
  source 1..25: mol_type = other DNA; mol_type = other DNA
ggcagtgatgggccggagatggaag

SEQ ID NO: 3856 - DNA, 25 bp, synthetic construct
  source 1..25: mol_type = other DNA; mol_type = other DNA
agcagtgagaggccggagatggaag

SEQ ID NO: 3857 - DNA, 25 bp, synthetic construct
  source 1..25: mol_type = other DNA; mol_type = other DNA
agcagtgaggagccggagatggaag

SEQ ID NO: 3858 - DNA, 25 bp, synthetic construct
  source 1..25: mol_type = other DNA; mol_type = other DNA
agcagtgagggaccggagatggaag

SEQ ID NO: 3859 - DNA, 25 bp, synthetic construct
  source 1..25: mol_type = other DNA; mol_type = other DNA
agcagtgaagggccggagatggaag

SEQ ID NO: 3860 - DNA, 25 bp, synthetic construct
  source 1..25: mol_type = other DNA; mol_type = other DNA
ggcagtgagaagccggagatggaag

SEQ ID NO: 3861 - DNA, 25 bp, synthetic construct
  source 1..25: mol_type = other DNA; mol_type = other DNA
ggcagtgagagaccggagatggaag

SEQ ID NO: 3862 - DNA, 25 bp, synthetic construct
  source 1..25: mol_type = other DNA; mol_type = other DNA
ggcagtgagaggccagagatggaag

SEQ ID NO: 3863 - DNA, 25 bp, synthetic construct
  source 1..25: mol_type = other DNA; mol_type = other DNA
ggcagtgagaggccgaagatggaag

SEQ ID NO: 3864 - DNA, 25 bp, synthetic construct
  source 1..25: mol_type = other DNA; mol_type = other DNA
ggcagtgagaggccggaaatggaag

SEQ ID NO: 3865 - DNA, 25 bp, synthetic construct
  source 1..25: mol_type = other DNA; mol_type = other DNA
ggcagtgagaggccggagatagaag

SEQ ID NO: 3866 - DNA, 25 bp, synthetic construct
  source 1..25: mol_type = other DNA; mol_type = other DNA
ggcagtgagaggccggagatgaaag

SEQ ID NO: 3867 - DNA, 25 bp, synthetic construct
  source 1..25: mol_type = other DNA; mol_type = other DNA
ggcagtgagaggccggagatggaaa

SEQ ID NO: 3868 - DNA, 25 bp, synthetic construct
  source 1..25: mol_type = other DNA; mol_type = other DNA
ggcagtgaggaaccggagatggaag

SEQ ID NO: 3869 - DNA, 25 bp, synthetic construct
  source 1..25: mol_type = other DNA; mol_type = other DNA
ggcagtgaggagccagagatggaag

SEQ ID NO: 3870 - DNA, 25 bp, synthetic construct
  source 1..25: mol_type = other DNA; mol_type = other DNA
ggcagtgaggagccgaagatggaag

SEQ ID NO: 3871 - DNA, 25 bp, synthetic construct
  source 1..25: mol_type = other DNA; mol_type = other DNA
ggcagtgaggagccggaaatggaag

SEQ ID NO: 3872 - DNA, 25 bp, synthetic construct
  source 1..25: mol_type = other DNA; mol_type = other DNA
ggcagtgaggagccggagatagaag

SEQ ID NO: 3873 - DNA, 25 bp, synthetic construct
  source 1..25: mol_type = other DNA; mol_type = other DNA
ggcagtgaggagccggagatgaaag

SEQ ID NO: 3874 - DNA, 25 bp, synthetic construct
  source 1..25: mol_type = other DNA; mol_type = other DNA
ggcagtgaggagccggagatggaaa

SEQ ID NO: 3875 - DNA, 25 bp, synthetic construct
  source 1..25: mol_type = other DNA; mol_type = other DNA
ggcagtgagggaccagagatggaag

SEQ ID NO: 3876 - DNA, 25 bp, synthetic construct
  source 1..25: mol_type = other DNA; mol_type = other DNA
ggcagtgagggaccgaagatggaag

SEQ ID NO: 3877 - DNA, 25 bp, synthetic construct
  source 1..25: mol_type = other DNA; mol_type = other DNA
ggcagtgagggaccggaaatggaag

SEQ ID NO: 3878 - DNA, 25 bp, synthetic construct
  source 1..25: mol_type = other DNA; mol_type = other DNA
ggcagtgagggaccggagatagaag

SEQ ID NO: 3879 - DNA, 25 bp, synthetic construct
  source 1..25: mol_type = other DNA; mol_type = other DNA
ggcagtgagggaccggagatgaaag

SEQ ID NO: 3880 - DNA, 25 bp, synthetic construct
  source 1..25: mol_type = other DNA; mol_type = other DNA
ggcagtgagggaccggagatggaaa

SEQ ID NO: 3881 - DNA, 25 bp, synthetic construct
  source 1..25: mol_type = other DNA; mol_type = other DNA
gacagtgagaggccggagatggaag

SEQ ID NO: 3882 - DNA, 25 bp, synthetic construct
  source 1..25: mol_type = other DNA; mol_type = other DNA
gacagtgaggagccggagatggaag

SEQ ID NO: 3883 - DNA, 25 bp, synthetic construct
  source 1..25: mol_type = other DNA; mol_type = other DNA
gacagtgagggaccggagatggaag

SEQ ID NO: 3884 - DNA, 25 bp, synthetic construct
  source 1..25: mol_type = other DNA; mol_type = other DNA
gacagtgaagggccggagatggaag

SEQ ID NO: 3885 - DNA, 25 bp, synthetic construct
  source 1..25: mol_type = other DNA; mol_type = other DNA
ggcaatgagaggccggagatggaag

SEQ ID NO: 3886 - DNA, 25 bp, synthetic construct
  source 1..25: mol_type = other DNA; mol_type = other DNA
ggcaatgaggagccggagatggaag

SEQ ID NO: 3887 - DNA, 25 bp, synthetic construct
  source 1..25: mol_type = other DNA; mol_type = other DNA
ggcaatgagggaccggagatggaag

SEQ ID NO: 3888 - DNA, 25 bp, synthetic construct
  source 1..25: mol_type = other DNA; mol_type = other DNA
ggcaatgaagggccggagatggaag

SEQ ID NO: 3889 - DNA, 25 bp, synthetic construct
  source 1..25: mol_type = other DNA; mol_type = other DNA
ggcagtaagaggccggagatggaag

SEQ ID NO: 3890 - DNA, 25 bp, synthetic construct
  source 1..25: mol_type = other DNA; mol_type = other DNA
ggcagtaaggagccggagatggaag

SEQ ID NO: 3891 - DNA, 25 bp, synthetic construct
  source 1..25: mol_type = other DNA; mol_type = other DNA
ggcagtaagggaccggagatggaag

SEQ ID NO: 3892 - DNA, 25 bp, synthetic construct
  source 1..25: mol_type = other DNA; mol_type = other DNA
ggcagtaaagggccggagatggaag

SEQ ID NO: 3893 - DNA, 25 bp, synthetic construct
  source 1..25: mol_type = other DNA; mol_type = other DNA
ggcagtgaaaggccggagatggaag

SEQ ID NO: 3894 - DNA, 25 bp, synthetic construct
  source 1..25: mol_type = other DNA; mol_type = other DNA
ggcagtgaagagccggagatggaag

SEQ ID NO: 3895 - DNA, 25 bp, synthetic construct
  source 1..25: mol_type = other DNA; mol_type = other DNA
ggcagtgaaggaccggagatggaag

SEQ ID NO: 3896 - DNA, 25 bp, synthetic construct
  source 1..25: mol_type = other DNA; mol_type = other DNA
ggcagtgaagggccagagatggaag

SEQ ID NO: 3897 - DNA, 25 bp, synthetic construct
  source 1..25: mol_type = other DNA; mol_type = other DNA
ggcagtgaagggccgaagatggaag

SEQ ID NO: 3898 - DNA, 25 bp, synthetic construct
  source 1..25: mol_type = other DNA; mol_type = other DNA
ggcagtgaagggccggaaatggaag

SEQ ID NO: 3899 - DNA, 25 bp, synthetic construct
  source 1..25: mol_type = other DNA; mol_type = other DNA
ggcagtgaagggccggagatagaag

SEQ ID NO: 3900 - DNA, 25 bp, synthetic construct
  source 1..25: mol_type = other DNA; mol_type = other DNA
ggcagtgaagggccggagatgaaag

SEQ ID NO: 3901 - DNA, 25 bp, synthetic construct
  source 1..25: mol_type = other DNA; mol_type = other DNA
ggcagtgaagggccggagatggaaa

SEQ ID NO: 3902 - DNA, 25 bp, synthetic construct
  source 1..25: mol_type = other DNA; mol_type = other DNA
tggcagtgatgggccggagatggaa

SEQ ID NO: 3903 - DNA, 25 bp, synthetic construct
  source 1..25: mol_type = other DNA; mol_type = other DNA
tggcagtgagtggccggagatggaa

SEQ ID NO: 3904 - DNA, 25 bp, synthetic construct
  source 1..25: mol_type = other DNA; mol_type = other DNA
tggcagtgaggtgccggagatggaa

SEQ ID NO: 3905 - DNA, 25 bp, synthetic construct
  source 1..25: mol_type = other DNA; mol_type = other DNA
tggcagtgagggtccggagatggaa

SEQ ID NO: 3906 - DNA, 25 bp, synthetic construct
  source 1..25: mol_type = other DNA; mol_type = other DNA
tggcagtgaaaggccggagatggaa

SEQ ID NO: 3907 - DNA, 25 bp, synthetic construct
  source 1..25: mol_type = other DNA; mol_type = other DNA
tggcagtgaagagccggagatggaa

SEQ ID NO: 3908 - DNA, 25 bp, synthetic construct
  source 1..25: mol_type = other DNA; mol_type = other DNA
tggcagtgaaggaccggagatggaa

SEQ ID NO: 3909 - DNA, 25 bp, synthetic construct
  source 1..25: mol_type = other DNA; mol_type = other DNA
tggcagtgaagggccagagatggaa

SEQ ID NO: 3910 - DNA, 25 bp, synthetic construct
  source 1..25: mol_type = other DNA; mol_type = other DNA
tggcagtgaagggccgaagatggaa

SEQ ID NO: 3911 - DNA, 25 bp, synthetic construct
  source 1..25: mol_type = other DNA; mol_type = other DNA
tggcagtgaagggccggaaatggaa

SEQ ID NO: 3912 - DNA, 25 bp, synthetic construct
  source 1..25: mol_type = other DNA; mol_type = other DNA
tggcagtgaagggccggagatagaa

SEQ ID NO: 3913 - DNA, 25 bp, synthetic construct
  source 1..25: mol_type = other DNA; mol_type = other DNA
tggcagtgaagggccggagatgaaa

SEQ ID NO: 3914 - DNA, 25 bp, synthetic construct
  source 1..25: mol_type = other DNA; mol_type = other DNA
tggcagtgagaagccggagatggaa

SEQ ID NO: 3915 - DNA, 25 bp, synthetic construct
  source 1..25: mol_type = other DNA; mol_type = other DNA
tggcagtgagagaccggagatggaa

SEQ ID NO: 3916 - DNA, 25 bp, synthetic construct
  source 1..25: mol_type = other DNA; mol_type = other DNA
tggcagtgagaggccagagatggaa

SEQ ID NO: 3917 - DNA, 25 bp, synthetic construct
  source 1..25: mol_type = other DNA; mol_type = other DNA
tggcagtgagaggccgaagatggaa

SEQ ID NO: 3918 - DNA, 25 bp, synthetic construct
  source 1..25: mol_type = other DNA; mol_type = other DNA
tggcagtgagaggccggaaatggaa

SEQ ID NO: 3919 - DNA, 25 bp, synthetic construct
  source 1..25: mol_type = other DNA; mol_type = other DNA
tggcagtgagaggccggagatagaa

SEQ ID NO: 3920 - DNA, 25 bp, synthetic construct
  source 1..25: mol_type = other DNA; mol_type = other DNA
tggcagtgagaggccggagatgaaa

SEQ ID NO: 3921 - DNA, 25 bp, synthetic construct
  source 1..25: mol_type = other DNA; mol_type = other DNA
tggcagtgaggaaccggagatggaa

SEQ ID NO: 3922 - DNA, 25 bp, synthetic construct
  source 1..25: mol_type = other DNA; mol_type = other DNA
tggcagtgaggagccagagatggaa

SEQ ID NO: 3923 - DNA, 25 bp, synthetic construct
  source 1..25: mol_type = other DNA; mol_type = other DNA
tggcagtgaggagccgaagatggaa

SEQ ID NO: 3924 - DNA, 25 bp, synthetic construct
  source 1..25: mol_type = other DNA; mol_type = other DNA
tggcagtgaggagccggaaatggaa

SEQ ID NO: 3925 - DNA, 25 bp, synthetic construct
  source 1..25: mol_type = other DNA; mol_type = other DNA
tggcagtgaggagccggagatagaa

SEQ ID NO: 3926 - DNA, 25 bp, synthetic construct
  source 1..25: mol_type = other DNA; mol_type = other DNA
tggcagtgaggagccggagatgaaa

SEQ ID NO: 3927 - DNA, 25 bp, synthetic construct
  source 1..25: mol_type = other DNA; mol_type = other DNA
tggcagtgagggaccagagatggaa

SEQ ID NO: 3928 - DNA, 25 bp, synthetic construct
  source 1..25: mol_type = other DNA; mol_type = other DNA
tggcagtgagggaccgaagatggaa

SEQ ID NO: 3929 - DNA, 25 bp, synthetic construct
  source 1..25: mol_type = other DNA; mol_type = other DNA
tggcagtgagggaccggaaatggaa

SEQ ID NO: 3930 - DNA, 25 bp, synthetic construct
  source 1..25: mol_type = other DNA; mol_type = other DNA
tggcagtgagggaccggagatagaa

SEQ ID NO: 3931 - DNA, 25 bp, synthetic construct
  source 1..25: mol_type = other DNA; mol_type = other DNA
tggcagtgagggaccggagatgaaa

SEQ ID NO: 3932 - DNA, 25 bp, synthetic construct
  source 1..25: mol_type = other DNA; mol_type = other DNA
tagcagtgaagggccggagatggaa

SEQ ID NO: 3933 - DNA, 25 bp, synthetic construct
  source 1..25: mol_type = other DNA; mol_type = other DNA
tagcagtgagaggccggagatggaa

SEQ ID NO: 3934 - DNA, 25 bp, synthetic construct
  source 1..25: mol_type = other DNA; mol_type = other DNA
tagcagtgaggagccggagatggaa

SEQ ID NO: 3935 - DNA, 25 bp, synthetic construct
  source 1..25: mol_type = other DNA; mol_type = other DNA
tagcagtgagggaccggagatggaa

SEQ ID NO: 3936 - DNA, 25 bp, synthetic construct
  source 1..25: mol_type = other DNA; mol_type = other DNA
tgacagtgaagggccggagatggaa

SEQ ID NO: 3937 - DNA, 25 bp, synthetic construct
  source 1..25: mol_type = other DNA; mol_type = other DNA
tgacagtgagaggccggagatggaa

SEQ ID NO: 3938 - DNA, 25 bp, synthetic construct
  source 1..25: mol_type = other DNA; mol_type = other DNA
tgacagtgaggagccggagatggaa

SEQ ID NO: 3939 - DNA, 25 bp, synthetic construct
  source 1..25: mol_type = other DNA; mol_type = other DNA
tgacagtgagggaccggagatggaa

SEQ ID NO: 3940 - DNA, 25 bp, synthetic construct
  source 1..25: mol_type = other DNA; mol_type = other DNA
tggcaatgaagggccggagatggaa

SEQ ID NO: 3941 - DNA, 25 bp, synthetic construct
  source 1..25: mol_type = other DNA; mol_type = other DNA
tggcaatgagaggccggagatggaa

SEQ ID NO: 3942 - DNA, 25 bp, synthetic construct
  source 1..25: mol_type = other DNA; mol_type = other DNA
tggcaatgaggagccggagatggaa

SEQ ID NO: 3943 - DNA, 25 bp, synthetic construct
  source 1..25: mol_type = other DNA; mol_type = other DNA
tggcaatgagggaccggagatggaa

SEQ ID NO: 3944 - DNA, 25 bp, synthetic construct
  source 1..25: mol_type = other DNA; mol_type = other DNA
tggcagtaaagggccggagatggaa

SEQ ID NO: 3945 - DNA, 25 bp, synthetic construct
  source 1..25: mol_type = other DNA; mol_type = other DNA
tggcagtaagaggccggagatggaa

SEQ ID NO: 3946 - DNA, 25 bp, synthetic construct
  source 1..25: mol_type = other DNA; mol_type = other DNA
tggcagtaaggagccggagatggaa

SEQ ID NO: 3947 - DNA, 25 bp, synthetic construct
  source 1..25: mol_type = other DNA; mol_type = other DNA
tggcagtaagggaccggagatggaa

SEQ ID NO: 3948 - DNA, 25 bp, synthetic construct
  source 1..25: mol_type = other DNA; mol_type = other DNA
gtggcagtgatgggccggagatgga

SEQ ID NO: 3949 - DNA, 25 bp, synthetic construct
  source 1..25: mol_type = other DNA; mol_type = other DNA
gtggcagtgagtggccggagatgga

SEQ ID NO: 3950 - DNA, 25 bp, synthetic construct
  source 1..25: mol_type = other DNA; mol_type = other DNA
gtggcagtgaggtgccggagatgga

SEQ ID NO: 3951 - DNA, 25 bp, synthetic construct
  source 1..25: mol_type = other DNA; mol_type = other DNA
gtggcagtgagggtccggagatgga

SEQ ID NO: 3952 - DNA, 25 bp, synthetic construct
  source 1..25: mol_type = other DNA; mol_type = other DNA
atggcagtgaagggccggagatgga

SEQ ID NO: 3953 - DNA, 25 bp, synthetic construct
  source 1..25: mol_type = other DNA; mol_type = other DNA
atggcagtgagaggccggagatgga

SEQ ID NO: 3954 - DNA, 25 bp, synthetic construct
  source 1..25: mol_type = other DNA; mol_type = other DNA
atggcagtgaggagccggagatgga

SEQ ID NO: 3955 - DNA, 25 bp, synthetic construct
  source 1..25: mol_type = other DNA; mol_type = other DNA
atggcagtgagggaccggagatgga

SEQ ID NO: 3956 - DNA, 25 bp, synthetic construct
  source 1..25: mol_type = other DNA; mol_type = other DNA
gtggcagtgaaaggccggagatgga

SEQ ID NO: 3957 - DNA, 25 bp, synthetic construct
  source 1..25: mol_type = other DNA; mol_type = other DNA
gtggcagtgaagagccggagatgga

SEQ ID NO: 3958 - DNA, 25 bp, synthetic construct
  source 1..25: mol_type = other DNA; mol_type = other DNA
gtggcagtgaaggaccggagatgga

SEQ ID NO: 3959 - DNA, 25 bp, synthetic construct
  source 1..25: mol_type = other DNA; mol_type = other DNA
gtggcagtgaagggccagagatgga

SEQ ID NO: 3960 - DNA, 25 bp, synthetic construct
  source 1..25: mol_type = other DNA; mol_type = other DNA
gtggcagtgaagggccgaagatgga

SEQ ID NO: 3961 - DNA, 25 bp, synthetic construct
  source 1..25: mol_type = other DNA; mol_type = other DNA
gtggcagtgaagggccggaaatgga

SEQ ID NO: 3962 - DNA, 25 bp, synthetic construct
  source 1..25: mol_type = other DNA; mol_type = other DNA
gtggcagtgaagggccggagataga

SEQ ID NO: 3963 - DNA, 25 bp, synthetic construct
  source 1..25: mol_type = other DNA; mol_type = other DNA
gtggcagtgaagggccggagatgaa

SEQ ID NO: 3964 - DNA, 25 bp, synthetic construct
  source 1..25: mol_type = other DNA; mol_type = other DNA
gtggcagtgagaagccggagatgga

SEQ ID NO: 3965 - DNA, 25 bp, synthetic construct
  source 1..25: mol_type = other DNA; mol_type = other DNA
gtggcagtgagagaccggagatgga

SEQ ID NO: 3966 - DNA, 25 bp, synthetic construct
  source 1..25: mol_type = other DNA; mol_type = other DNA
gtggcagtgagaggccagagatgga

SEQ ID NO: 3967 - DNA, 25 bp, synthetic construct
  source 1..25: mol_type = other DNA; mol_type = other DNA
gtggcagtgagaggccgaagatgga

SEQ ID NO: 3968 - DNA, 25 bp, synthetic construct
  source 1..25: mol_type = other DNA; mol_type = other DNA
gtggcagtgagaggccggaaatgga

SEQ ID NO: 3969 - DNA, 25 bp, synthetic construct
  source 1..25: mol_type = other DNA; mol_type = other DNA
gtggcagtgagaggccggagataga

SEQ ID NO: 3970 - DNA, 25 bp, synthetic construct
  source 1..25: mol_type = other DNA; mol_type = other DNA
gtggcagtgagaggccggagatgaa

SEQ ID NO: 3971 - DNA, 25 bp, synthetic construct
  source 1..25: mol_type = other DNA; mol_type = other DNA
gtggcagtgaggaaccggagatgga

SEQ ID NO: 3972 - DNA, 25 bp, synthetic construct
  source 1..25: mol_type = other DNA; mol_type = other DNA
gtggcagtgaggagccagagatgga

SEQ ID NO: 3973 - DNA, 25 bp, synthetic construct
  source 1..25: mol_type = other DNA; mol_type = other DNA
gtggcagtgaggagccgaagatgga

SEQ ID NO: 3974 - DNA, 25 bp, synthetic construct
  source 1..25: mol_type = other DNA; mol_type = other DNA
gtggcagtgaggagccggaaatgga

SEQ ID NO: 3975 - DNA, 25 bp, synthetic construct
  source 1..25: mol_type = other DNA; mol_type = other DNA
gtggcagtgaggagccggagataga

SEQ ID NO: 3976 - DNA, 25 bp, synthetic construct
  source 1..25: mol_type = other DNA; mol_type = other DNA
gtggcagtgaggagccggagatgaa

SEQ ID NO: 3977 - DNA, 25 bp, synthetic construct
  source 1..25: mol_type = other DNA; mol_type = other DNA
gtggcagtgagggaccagagatgga

SEQ ID NO: 3978 - DNA, 25 bp, synthetic construct
  source 1..25: mol_type = other DNA; mol_type = other DNA
gtggcagtgagggaccgaagatgga

SEQ ID NO: 3979 - DNA, 25 bp, synthetic construct
  source 1..25: mol_type = other DNA; mol_type = other DNA
gtggcagtgagggaccggaaatgga

SEQ ID NO: 3980 - DNA, 25 bp, synthetic construct
  source 1..25: mol_type = other DNA; mol_type = other DNA
gtggcagtgagggaccggagataga

SEQ ID NO: 3981 - DNA, 25 bp, synthetic construct
  source 1..25: mol_type = other DNA; mol_type = other DNA
gtggcagtgagggaccggagatgaa

SEQ ID NO: 3982 - DNA, 25 bp, synthetic construct
  source 1..25: mol_type = other DNA; mol_type = other DNA
gtagcagtgaagggccggagatgga

SEQ ID NO: 3983 - DNA, 25 bp, synthetic construct
  source 1..25: mol_type = other DNA; mol_type = other DNA
gtagcagtgagaggccggagatgga

SEQ ID NO: 3984 - DNA, 25 bp, synthetic construct
  source 1..25: mol_type = other DNA; mol_type = other DNA
gtagcagtgaggagccggagatgga

SEQ ID NO: 3985 - DNA, 25 bp, synthetic construct
  source 1..25: mol_type = other DNA; mol_type = other DNA
gtagcagtgagggaccggagatgga

SEQ ID NO: 3986 - DNA, 25 bp, synthetic construct
  source 1..25: mol_type = other DNA; mol_type = other DNA
gtgacagtgaagggccggagatgga

SEQ ID NO: 3987 - DNA, 25 bp, synthetic construct
  source 1..25: mol_type = other DNA; mol_type = other DNA
gtgacagtgagaggccggagatgga

SEQ ID NO: 3988 - DNA, 25 bp, synthetic construct
  source 1..25: mol_type = other DNA; mol_type = other DNA
gtgacagtgaggagccggagatgga

SEQ ID NO: 3989 - DNA, 25 bp, synthetic construct
  source 1..25: mol_type = other DNA; mol_type = other DNA
gtgacagtgagggaccggagatgga

SEQ ID NO: 3990 - DNA, 25 bp, synthetic construct
  source 1..25: mol_type = other DNA; mol_type = other DNA
gtggcaatgaagggccggagatgga

SEQ ID NO: 3991 - DNA, 25 bp, synthetic construct
  source 1..25: mol_type = other DNA; mol_type = other DNA
gtggcaatgagaggccggagatgga

SEQ ID NO: 3992 - DNA, 25 bp, synthetic construct
  source 1..25: mol_type = other DNA; mol_type = other DNA
gtggcaatgaggagccggagatgga

SEQ ID NO: 3993 - DNA, 25 bp, synthetic construct
  source 1..25: mol_type = other DNA; mol_type = other DNA
gtggcaatgagggaccggagatgga

SEQ ID NO: 3994 - DNA, 25 bp, synthetic construct
  source 1..25: mol_type = other DNA; mol_type = other DNA
gtggcagtaaagggccggagatgga

SEQ ID NO: 3995 - DNA, 25 bp, synthetic construct
  source 1..25: mol_type = other DNA; mol_type = other DNA
gtggcagtaagaggccggagatgga

SEQ ID NO: 3996 - DNA, 25 bp, synthetic construct
  source 1..25: mol_type = other DNA; mol_type = other DNA
gtggcagtaaggagccggagatgga

SEQ ID NO: 3997 - DNA, 25 bp, synthetic construct
  source 1..25: mol_type = other DNA; mol_type = other DNA
gtggcagtaagggaccggagatgga

SEQ ID NO: 3998 - DNA, 25 bp, synthetic construct
  source 1..25: mol_type = other DNA; mol_type = other DNA
agtggcagtgatgggccggagatgg

SEQ ID NO: 3999 - DNA, 25 bp, synthetic construct
  source 1..25: mol_type = other DNA; mol_type = other DNA
agtggcagtgagtggccggagatgg

SEQ ID NO: 4000 - DNA, 25 bp, synthetic construct
  source 1..25: mol_type = other DNA; mol_type = other DNA
agtggcagtgaggtgccggagatgg

SEQ ID NO: 4001 - DNA, 25 bp, synthetic construct
  source 1..25: mol_type = other DNA; mol_type = other DNA
agtggcagtgagggtccggagatgg

SEQ ID NO: 4002 - DNA, 25 bp, synthetic construct
  source 1..25: mol_type = other DNA; mol_type = other DNA
agtggcagtaaagggccggagatgg

SEQ ID NO: 4003 - DNA, 25 bp, synthetic construct
  source 1..25: mol_type = other DNA; mol_type = other DNA
agtggcagtaagaggccggagatgg

SEQ ID NO: 4004 - DNA, 25 bp, synthetic construct
  source 1..25: mol_type = other DNA; mol_type = other DNA
agtggcagtaaggagccggagatgg

SEQ ID NO: 4005 - DNA, 25 bp, synthetic construct
  source 1..25: mol_type = other DNA; mol_type = other DNA
agtggcagtaagggaccggagatgg

SEQ ID NO: 4006 - DNA, 25 bp, synthetic construct
  source 1..25: mol_type = other DNA; mol_type = other DNA
agtggcagtgaaaggccggagatgg

SEQ ID NO: 4007 - DNA, 25 bp, synthetic construct
  source 1..25: mol_type = other DNA; mol_type = other DNA
agtggcagtgaagagccggagatgg

SEQ ID NO: 4008 - DNA, 25 bp, synthetic construct
  source 1..25: mol_type = other DNA; mol_type = other DNA
agtggcagtgaaggaccggagatgg

SEQ ID NO: 4009 - DNA, 25 bp, synthetic construct
  source 1..25: mol_type = other DNA; mol_type = other DNA
agtggcagtgaagggccagagatgg

SEQ ID NO: 4010 - DNA, 25 bp, synthetic construct
  source 1..25: mol_type = other DNA; mol_type = other DNA
agtggcagtgaagggccgaagatgg

SEQ ID NO: 4011 - DNA, 25 bp, synthetic construct
  source 1..25: mol_type = other DNA; mol_type = other DNA
agtggcagtgaagggccggaaatgg

SEQ ID NO: 4012 - DNA, 25 bp, synthetic construct
  source 1..25: mol_type = other DNA; mol_type = other DNA
agtggcagtgaagggccggagatag

SEQ ID NO: 4013 - DNA, 25 bp, synthetic construct
  source 1..25: mol_type = other DNA; mol_type = other DNA
agtggcagtgaagggccggagatga

SEQ ID NO: 4014 - DNA, 25 bp, synthetic construct
  source 1..25: mol_type = other DNA; mol_type = other DNA
agtggcagtgagaagccggagatgg

SEQ ID NO: 4015 - DNA, 25 bp, synthetic construct
  source 1..25: mol_type = other DNA; mol_type = other DNA
agtggcagtgagagaccggagatgg

SEQ ID NO: 4016 - DNA, 25 bp, synthetic construct
  source 1..25: mol_type = other DNA; mol_type = other DNA
agtggcagtgagaggccagagatgg

SEQ ID NO: 4017 - DNA, 25 bp, synthetic construct
  source 1..25: mol_type = other DNA; mol_type = other DNA
agtggcagtgagaggccgaagatgg

SEQ ID NO: 4018 - DNA, 25 bp, synthetic construct
  source 1..25: mol_type = other DNA; mol_type = other DNA
agtggcagtgagaggccggaaatgg

SEQ ID NO: 4019 - DNA, 25 bp, synthetic construct
  source 1..25: mol_type = other DNA; mol_type = other DNA
agtggcagtgagaggccggagatag

SEQ ID NO: 4020 - DNA, 25 bp, synthetic construct
  source 1..25: mol_type = other DNA; mol_type = other DNA
agtggcagtgagaggccggagatga

SEQ ID NO: 4021 - DNA, 25 bp, synthetic construct
  source 1..25: mol_type = other DNA; mol_type = other DNA
agtggcagtgaggaaccggagatgg

SEQ ID NO: 4022 - DNA, 25 bp, synthetic construct
  source 1..25: mol_type = other DNA; mol_type = other DNA
agtggcagtgaggagccagagatgg

SEQ ID NO: 4023 - DNA, 25 bp, synthetic construct
  source 1..25: mol_type = other DNA; mol_type = other DNA
agtggcagtgaggagccgaagatgg

SEQ ID NO: 4024 - DNA, 25 bp, synthetic construct
  source 1..25: mol_type = other DNA; mol_type = other DNA
agtggcagtgaggagccggaaatgg

SEQ ID NO: 4025 - DNA, 25 bp, synthetic construct
  source 1..25: mol_type = other DNA; mol_type = other DNA
agtggcagtgaggagccggagatag

SEQ ID NO: 4026 - DNA, 25 bp, synthetic construct
  source 1..25: mol_type = other DNA; mol_type = other DNA
agtggcagtgaggagccggagatga

SEQ ID NO: 4027 - DNA, 25 bp, synthetic construct
  source 1..25: mol_type = other DNA; mol_type = other DNA
agtggcagtgagggaccagagatgg

SEQ ID NO: 4028 - DNA, 25 bp, synthetic construct
  source 1..25: mol_type = other DNA; mol_type = other DNA
agtggcagtgagggaccgaagatgg

SEQ ID NO: 4029 - DNA, 25 bp, synthetic construct
  source 1..25: mol_type = other DNA; mol_type = other DNA
agtggcagtgagggaccggaaatgg

SEQ ID NO: 4030 - DNA, 25 bp, synthetic construct
  source 1..25: mol_type = other DNA; mol_type = other DNA
agtggcagtgagggaccggagatag

SEQ ID NO: 4031 - DNA, 25 bp, synthetic construct
  source 1..25: mol_type = other DNA; mol_type = other DNA
agtggcagtgagggaccggagatga

SEQ ID NO: 4032 - DNA, 25 bp, synthetic construct
  source 1..25: mol_type = other DNA; mol_type = other DNA
aatggcagtgaagggccggagatgg

SEQ ID NO: 4033 - DNA, 25 bp, synthetic construct
  source 1..25: mol_type = other DNA; mol_type = other DNA
aatggcagtgagaggccggagatgg

SEQ ID NO: 4034 - DNA, 25 bp, synthetic construct
  source 1..25: mol_type = other DNA; mol_type = other DNA
aatggcagtgaggagccggagatgg

SEQ ID NO: 4035 - DNA, 25 bp, synthetic construct
  source 1..25: mol_type = other DNA; mol_type = other DNA
aatggcagtgagggaccggagatgg

SEQ ID NO: 4036 - DNA, 25 bp, synthetic construct
  source 1..25: mol_type = other DNA; mol_type = other DNA
agtagcagtgaagggccggagatgg

SEQ ID NO: 4037 - DNA, 25 bp, synthetic construct
  source 1..25: mol_type = other DNA; mol_type = other DNA
agtagcagtgagaggccggagatgg

SEQ ID NO: 4038 - DNA, 25 bp, synthetic construct
  source 1..25: mol_type = other DNA; mol_type = other DNA
agtagcagtgaggagccggagatgg

SEQ ID NO: 4039 - DNA, 25 bp, synthetic construct
  source 1..25: mol_type = other DNA; mol_type = other DNA
agtagcagtgagggaccggagatgg

SEQ ID NO: 4040 - DNA, 25 bp, synthetic construct
  source 1..25: mol_type = other DNA; mol_type = other DNA
agtgacagtgaagggccggagatgg

SEQ ID NO: 4041 - DNA, 25 bp, synthetic construct
  source 1..25: mol_type = other DNA; mol_type = other DNA
agtgacagtgagaggccggagatgg

SEQ ID NO: 4042 - DNA, 25 bp, synthetic construct
  source 1..25: mol_type = other DNA; mol_type = other DNA
agtgacagtgaggagccggagatgg

SEQ ID NO: 4043 - DNA, 25 bp, synthetic construct
  source 1..25: mol_type = other DNA; mol_type = other DNA
agtgacagtgagggaccggagatgg

SEQ ID NO: 4044 - DNA, 25 bp, synthetic construct
  source 1..25: mol_type = other DNA; mol_type = other DNA
agtggcaatgaagggccggagatgg

SEQ ID NO: 4045 - DNA, 25 bp, synthetic construct
  source 1..25: mol_type = other DNA; mol_type = other DNA
agtggcaatgagaggccggagatgg

SEQ ID NO: 4046 - DNA, 25 bp, synthetic construct
  source 1..25: mol_type = other DNA; mol_type = other DNA
agtggcaatgaggagccggagatgg

SEQ ID NO: 4047 - DNA, 25 bp, synthetic construct
  source 1..25: mol_type = other DNA; mol_type = other DNA
agtggcaatgagggaccggagatgg

SEQ ID NO: 4048 - DNA, 25 bp, synthetic construct
  source 1..25: mol_type = other DNA; mol_type = other DNA
cagtggcagtgatgggccggagatg

SEQ ID NO: 4049 - DNA, 25 bp, synthetic construct
  source 1..25: mol_type = other DNA; mol_type = other DNA
cagtggcagtgagtggccggagatg

SEQ ID NO: 4050 - DNA, 25 bp, synthetic construct
  source 1..25: mol_type = other DNA; mol_type = other DNA
cagtggcagtgaggtgccggagatg

SEQ ID NO: 4051 - DNA, 25 bp, synthetic construct
  source 1..25: mol_type = other DNA; mol_type = other DNA
cagtggcagtgagggtccggagatg

SEQ ID NO: 4052 - DNA, 25 bp, synthetic construct
  source 1..25: mol_type = other DNA; mol_type = other DNA
cagtggcagtaaagggccggagatg

SEQ ID NO: 4053 - DNA, 25 bp, synthetic construct
  source 1..25: mol_type = other DNA; mol_type = other DNA
cagtggcagtaagaggccggagatg

SEQ ID NO: 4054 - DNA, 25 bp, synthetic construct
  source 1..25: mol_type = other DNA; mol_type = other DNA
cagtggcagtaaggagccggagatg

SEQ ID NO: 4055 - DNA, 25 bp, synthetic construct
  source 1..25: mol_type = other DNA; mol_type = other DNA
cagtggcagtaagggaccggagatg

SEQ ID NO: 4056 - DNA, 25 bp, synthetic construct
  source 1..25: mol_type = other DNA; mol_type = other DNA
cagtggcagtgaaaggccggagatg

SEQ ID NO: 4057 - DNA, 25 bp, synthetic construct
  source 1..25: mol_type = other DNA; mol_type = other DNA
cagtggcagtgaagagccggagatg

SEQ ID NO: 4058 - DNA, 25 bp, synthetic construct
  source 1..25: mol_type = other DNA; mol_type = other DNA
cagtggcagtgaaggaccggagatg

SEQ ID NO: 4059 - DNA, 25 bp, synthetic construct
  source 1..25: mol_type = other DNA; mol_type = other DNA
cagtggcagtgaagggccagagatg

SEQ ID NO: 4060 - DNA, 25 bp, synthetic construct
  source 1..25: mol_type = other DNA; mol_type = other DNA
cagtggcagtgaagggccgaagatg

SEQ ID NO: 4061 - DNA, 25 bp, synthetic construct
  source 1..25: mol_type = other DNA; mol_type = other DNA
cagtggcagtgaagggccggaaatg

SEQ ID NO: 4062 - DNA, 25 bp, synthetic construct
  source 1..25: mol_type = other DNA; mol_type = other DNA
cagtggcagtgaagggccggagata

SEQ ID NO: 4063 - DNA, 25 bp, synthetic construct
  source 1..25: mol_type = other DNA; mol_type = other DNA
cagtggcagtgagaagccggagatg

SEQ ID NO: 4064 - DNA, 25 bp, synthetic construct
  source 1..25: mol_type = other DNA; mol_type = other DNA
cagtggcagtgagagaccggagatg

SEQ ID NO: 4065 - DNA, 25 bp, synthetic construct
  source 1..25: mol_type = other DNA; mol_type = other DNA
cagtggcagtgagaggccagagatg

SEQ ID NO: 4066 - DNA, 25 bp, synthetic construct
  source 1..25: mol_type = other DNA; mol_type = other DNA
cagtggcagtgagaggccgaagatg

SEQ ID NO: 4067 - DNA, 25 bp, synthetic construct
  source 1..25: mol_type = other DNA; mol_type = other DNA
cagtggcagtgagaggccggaaatg

SEQ ID NO: 4068 - DNA, 25 bp, synthetic construct
  source 1..25: mol_type = other DNA; mol_type = other DNA
cagtggcagtgagaggccggagata

SEQ ID NO: 4069 - DNA, 25 bp, synthetic construct
  source 1..25: mol_type = other DNA; mol_type = other DNA
cagtggcagtgaggaaccggagatg

SEQ ID NO: 4070 - DNA, 25 bp, synthetic construct
  source 1..25: mol_type = other DNA; mol_type = other DNA
cagtggcagtgaggagccagagatg

SEQ ID NO: 4071 - DNA, 25 bp, synthetic construct
  source 1..25: mol_type = other DNA; mol_type = other DNA
cagtggcagtgaggagccgaagatg

SEQ ID NO: 4072 - DNA, 25 bp, synthetic construct
  source 1..25: mol_type = other DNA; mol_type = other DNA
cagtggcagtgaggagccggaaatg

SEQ ID NO: 4073 - DNA, 25 bp, synthetic construct
  source 1..25: mol_type = other DNA; mol_type = other DNA
cagtggcagtgaggagccggagata

SEQ ID NO: 4074 - DNA, 25 bp, synthetic construct
  source 1..25: mol_type = other DNA; mol_type = other DNA
cagtggcagtgagggaccagagatg

SEQ ID NO: 4075 - DNA, 25 bp, synthetic construct
  source 1..25: mol_type = other DNA; mol_type = other DNA
cagtggcagtgagggaccgaagatg

SEQ ID NO: 4076 - DNA, 25 bp, synthetic construct
  source 1..25: mol_type = other DNA; mol_type = other DNA
cagtggcagtgagggaccggaaatg

SEQ ID NO: 4077 - DNA, 25 bp, synthetic construct
  source 1..25: mol_type = other DNA; mol_type = other DNA
cagtggcagtgagggaccggagata

SEQ ID NO: 4078 - DNA, 25 bp, synthetic construct
  source 1..25: mol_type = other DNA; mol_type = other DNA
caatggcagtgaagggccggagatg

SEQ ID NO: 4079 - DNA, 25 bp, synthetic construct
  source 1..25: mol_type = other DNA; mol_type = other DNA
caatggcagtgagaggccggagatg

SEQ ID NO: 4080 - DNA, 25 bp, synthetic construct
  source 1..25: mol_type = other DNA; mol_type = other DNA
caatggcagtgaggagccggagatg

SEQ ID NO: 4081 - DNA, 25 bp, synthetic construct
  source 1..25: mol_type = other DNA; mol_type = other DNA
caatggcagtgagggaccggagatg

SEQ ID NO: 4082 - DNA, 25 bp, synthetic construct
  source 1..25: mol_type = other DNA; mol_type = other DNA
cagtagcagtgaagggccggagatg

SEQ ID NO: 4083 - DNA, 25 bp, synthetic construct
  source 1..25: mol_type = other DNA; mol_type = other DNA
cagtagcagtgagaggccggagatg

SEQ ID NO: 4084 - DNA, 25 bp, synthetic construct
  source 1..25: mol_type = other DNA; mol_type = other DNA
cagtagcagtgaggagccggagatg

SEQ ID NO: 4085 - DNA, 25 bp, synthetic construct
  source 1..25: mol_type = other DNA; mol_type = other DNA
cagtagcagtgagggaccggagatg

SEQ ID NO: 4086 - DNA, 25 bp, synthetic construct
  source 1..25: mol_type = other DNA; mol_type = other DNA
cagtgacagtgaagggccggagatg

SEQ ID NO: 4087 - DNA, 25 bp, synthetic construct
  source 1..25: mol_type = other DNA; mol_type = other DNA
cagtgacagtgagaggccggagatg

SEQ ID NO: 4088 - DNA, 25 bp, synthetic construct
  source 1..25: mol_type = other DNA; mol_type = other DNA
cagtgacagtgaggagccggagatg

SEQ ID NO: 4089 - DNA, 25 bp, synthetic construct
  source 1..25: mol_type = other DNA; mol_type = other DNA
cagtgacagtgagggaccggagatg

SEQ ID NO: 4090 - DNA, 25 bp, synthetic construct
  source 1..25: mol_type = other DNA; mol_type = other DNA
cagtggcaatgaagggccggagatg

SEQ ID NO: 4091 - DNA, 25 bp, synthetic construct
  source 1..25: mol_type = other DNA; mol_type = other DNA
cagtggcaatgagaggccggagatg

SEQ ID NO: 4092 - DNA, 25 bp, synthetic construct
  source 1..25: mol_type = other DNA; mol_type = other DNA
cagtggcaatgaggagccggagatg

SEQ ID NO: 4093 - DNA, 25 bp, synthetic construct
  source 1..25: mol_type = other DNA; mol_type = other DNA
cagtggcaatgagggaccggagatg

SEQ ID NO: 4094 - DNA, 25 bp, synthetic construct
  source 1..25: mol_type = other DNA; mol_type = other DNA
gcagtggcagtgatgggccggagat

SEQ ID NO: 4095 - DNA, 25 bp, synthetic construct
  source 1..25: mol_type = other DNA; mol_type = other DNA
gcagtggcagtgagtggccggagat

SEQ ID NO: 4096 - DNA, 25 bp, synthetic construct
  source 1..25: mol_type = other DNA; mol_type = other DNA
gcagtggcagtgaggtgccggagat

SEQ ID NO: 4097 - DNA, 25 bp, synthetic construct
  source 1..25: mol_type = other DNA; mol_type = other DNA
gcagtggcagtgagggtccggagat

SEQ ID NO: 4098 - DNA, 25 bp, synthetic construct
  source 1..25: mol_type = other DNA; mol_type = other DNA
acagtggcagtgaagggccggagat

SEQ ID NO: 4099 - DNA, 25 bp, synthetic construct
  source 1..25: mol_type = other DNA; mol_type = other DNA
acagtggcagtgagaggccggagat

SEQ ID NO: 4100 - DNA, 25 bp, synthetic construct
  source 1..25: mol_type = other DNA; mol_type = other DNA
acagtggcagtgaggagccggagat

SEQ ID NO: 4101 - DNA, 25 bp, synthetic construct
  source 1..25: mol_type = other DNA; mol_type = other DNA
acagtggcagtgagggaccggagat

SEQ ID NO: 4102 - DNA, 25 bp, synthetic construct
  source 1..25: mol_type = other DNA; mol_type = other DNA
gcagtggcaatgaagggccggagat

SEQ ID NO: 4103 - DNA, 25 bp, synthetic construct
  source 1..25: mol_type = other DNA; mol_type = other DNA
gcagtggcaatgagaggccggagat

SEQ ID NO: 4104 - DNA, 25 bp, synthetic construct
  source 1..25: mol_type = other DNA; mol_type = other DNA
gcagtggcaatgaggagccggagat

SEQ ID NO: 4105 - DNA, 25 bp, synthetic construct
  source 1..25: mol_type = other DNA; mol_type = other DNA
gcagtggcaatgagggaccggagat

SEQ ID NO: 4106 - DNA, 25 bp, synthetic construct
  source 1..25: mol_type = other DNA; mol_type = other DNA
gcagtggcagtaaagggccggagat

SEQ ID NO: 4107 - DNA, 25 bp, synthetic construct
  source 1..25: mol_type = other DNA; mol_type = other DNA
gcagtggcagtaagaggccggagat

SEQ ID NO: 4108 - DNA, 25 bp, synthetic construct
  source 1..25: mol_type = other DNA; mol_type = other DNA
gcagtggcagtaaggagccggagat

SEQ ID NO: 4109 - DNA, 25 bp, synthetic construct
  source 1..25: mol_type = other DNA; mol_type = other DNA
gcagtggcagtaagggaccggagat

SEQ ID NO: 4110 - DNA, 25 bp, synthetic construct
  source 1..25: mol_type = other DNA; mol_type = other DNA
gcagtggcagtgaaaggccggagat

SEQ ID NO: 4111 - DNA, 25 bp, synthetic construct
  source 1..25: mol_type = other DNA; mol_type = other DNA
gcagtggcagtgaagagccggagat

SEQ ID NO: 4112 - DNA, 25 bp, synthetic construct
  source 1..25: mol_type = other DNA; mol_type = other DNA
gcagtggcagtgaaggaccggagat

SEQ ID NO: 4113 - DNA, 25 bp, synthetic construct
  source 1..25: mol_type = other DNA; mol_type = other DNA
gcagtggcagtgaagggccagagat

SEQ ID NO: 4114 - DNA, 25 bp, synthetic construct
  source 1..25: mol_type = other DNA; mol_type = other DNA
gcagtggcagtgaagggccgaagat

SEQ ID NO: 4115 - DNA, 25 bp, synthetic construct
  source 1..25: mol_type = other DNA; mol_type = other DNA
gcagtggcagtgaagggccggaaat

SEQ ID NO: 4116 - DNA, 25 bp, synthetic construct
  source 1..25: mol_type = other DNA; mol_type = other DNA
gcagtggcagtgagaagccggagat

SEQ ID NO: 4117 - DNA, 25 bp, synthetic construct
  source 1..25: mol_type = other DNA; mol_type = other DNA
gcagtggcagtgagagaccggagat

SEQ ID NO: 4118 - DNA, 25 bp, synthetic construct
  source 1..25: mol_type = other DNA; mol_type = other DNA
gcagtggcagtgagaggccagagat

SEQ ID NO: 4119 - DNA, 25 bp, synthetic construct
  source 1..25: mol_type = other DNA; mol_type = other DNA
gcagtggcagtgagaggccgaagat

SEQ ID NO: 4120 - DNA, 25 bp, synthetic construct
  source 1..25: mol_type = other DNA; mol_type = other DNA
gcagtggcagtgagaggccggaaat

SEQ ID NO: 4121 - DNA, 25 bp, synthetic construct
  source 1..25: mol_type = other DNA; mol_type = other DNA
gcagtggcagtgaggaaccggagat

SEQ ID NO: 4122 - DNA, 25 bp, synthetic construct
  source 1..25: mol_type = other DNA; mol_type = other DNA
gcagtggcagtgaggagccagagat

SEQ ID NO: 4123 - DNA, 25 bp, synthetic construct
  source 1..25: mol_type = other DNA; mol_type = other DNA
gcagtggcagtgaggagccgaagat

SEQ ID NO: 4124 - DNA, 25 bp, synthetic construct
  source 1..25: mol_type = other DNA; mol_type = other DNA
gcagtggcagtgaggagccggaaat

SEQ ID NO: 4125 - DNA, 25 bp, synthetic construct
  source 1..25: mol_type = other DNA; mol_type = other DNA
gcagtggcagtgagggaccagagat

SEQ ID NO: 4126 - DNA, 25 bp, synthetic construct
  source 1..25: mol_type = other DNA; mol_type = other DNA
gcagtggcagtgagggaccgaagat

SEQ ID NO: 4127 - DNA, 25 bp, synthetic construct
  source 1..25: mol_type = other DNA; mol_type = other DNA
gcagtggcagtgagggaccggaaat

SEQ ID NO: 4128 - DNA, 25 bp, synthetic construct
  source 1..25: mol_type = other DNA; mol_type = other DNA
gcaatggcagtgaagggccggagat

SEQ ID NO: 4129 - DNA, 25 bp, synthetic construct
  source 1..25: mol_type = other DNA; mol_type = other DNA
gcaatggcagtgagaggccggagat

SEQ ID NO: 4130 - DNA, 25 bp, synthetic construct
  source 1..25: mol_type = other DNA; mol_type = other DNA
gcaatggcagtgaggagccggagat

SEQ ID NO: 4131 - DNA, 25 bp, synthetic construct
  source 1..25: mol_type = other DNA; mol_type = other DNA
gcaatggcagtgagggaccggagat

SEQ ID NO: 4132 - DNA, 25 bp, synthetic construct
  source 1..25: mol_type = other DNA; mol_type = other DNA
gcagtagcagtgaagggccggagat

SEQ ID NO: 4133 - DNA, 25 bp, synthetic construct
  source 1..25: mol_type = other DNA; mol_type = other DNA
gcagtagcagtgagaggccggagat

SEQ ID NO: 4134 - DNA, 25 bp, synthetic construct
  source 1..25: mol_type = other DNA; mol_type = other DNA
gcagtagcagtgaggagccggagat

SEQ ID NO: 4135 - DNA, 25 bp, synthetic construct
  source 1..25: mol_type = other DNA; mol_type = other DNA
gcagtagcagtgagggaccggagat

SEQ ID NO: 4136 - DNA, 25 bp, synthetic construct
  source 1..25: mol_type = other DNA; mol_type = other DNA
gcagtgacagtgaagggccggagat

SEQ ID NO: 4137 - DNA, 25 bp, synthetic construct
  source 1..25: mol_type = other DNA; mol_type = other DNA
gcagtgacagtgagaggccggagat

SEQ ID NO: 4138 - DNA, 25 bp, synthetic construct
  source 1..25: mol_type = other DNA; mol_type = other DNA
gcagtgacagtgaggagccggagat

SEQ ID NO: 4139 - DNA, 25 bp, synthetic construct
  source 1..25: mol_type = other DNA; mol_type = other DNA
gcagtgacagtgagggaccggagat

SEQ ID NO: 4140 - DNA, 25 bp, synthetic construct
  source 1..25: mol_type = other DNA; mol_type = other DNA
ggcagtggcagtgatgggccggaga

SEQ ID NO: 4141 - DNA, 25 bp, synthetic construct
  source 1..25: mol_type = other DNA; mol_type = other DNA
ggcagtggcagtgagtggccggaga

SEQ ID NO: 4142 - DNA, 25 bp, synthetic construct
  source 1..25: mol_type = other DNA; mol_type = other DNA
ggcagtggcagtgaggtgccggaga

SEQ ID NO: 4143 - DNA, 25 bp, synthetic construct
  source 1..25: mol_type = other DNA; mol_type = other DNA
ggcagtggcagtgagggtccggaga

SEQ ID NO: 4144 - DNA, 25 bp, synthetic construct
  source 1..25: mol_type = other DNA; mol_type = other DNA
agcagtggcagtgaagggccggaga

SEQ ID NO: 4145 - DNA, 25 bp, synthetic construct
  source 1..25: mol_type = other DNA; mol_type = other DNA
agcagtggcagtgagaggccggaga

SEQ ID NO: 4146 - DNA, 25 bp, synthetic construct
  source 1..25: mol_type = other DNA; mol_type = other DNA
agcagtggcagtgaggagccggaga

SEQ ID NO: 4147 - DNA, 25 bp, synthetic construct
  source 1..25: mol_type = other DNA; mol_type = other DNA
agcagtggcagtgagggaccggaga

SEQ ID NO: 4148 - DNA, 25 bp, synthetic construct
  source 1..25: mol_type = other DNA; mol_type = other DNA
ggcagtggcaatgaagggccggaga

SEQ ID NO: 4149 - DNA, 25 bp, synthetic construct
  source 1..25: mol_type = other DNA; mol_type = other DNA
ggcagtggcaatgagaggccggaga

SEQ ID NO: 4150 - DNA, 25 bp, synthetic construct
  source 1..25: mol_type = other DNA; mol_type = other DNA
ggcagtggcaatgaggagccggaga

SEQ ID NO: 4151 - DNA, 25 bp, synthetic construct
  source 1..25: mol_type = other DNA; mol_type = other DNA
ggcagtggcaatgagggaccggaga

SEQ ID NO: 4152 - DNA, 25 bp, synthetic construct
  source 1..25: mol_type = other DNA; mol_type = other DNA
ggcagtggcagtaaagggccggaga

SEQ ID NO: 4153 - DNA, 25 bp, synthetic construct
  source 1..25: mol_type = other DNA; mol_type = other DNA
ggcagtggcagtaagaggccggaga

SEQ ID NO: 4154 - DNA, 25 bp, synthetic construct
  source 1..25: mol_type = other DNA; mol_type = other DNA
ggcagtggcagtaaggagccggaga

SEQ ID NO: 4155 - DNA, 25 bp, synthetic construct
  source 1..25: mol_type = other DNA; mol_type = other DNA
ggcagtggcagtaagggaccggaga

SEQ ID NO: 4156 - DNA, 25 bp, synthetic construct
  source 1..25: mol_type = other DNA; mol_type = other DNA
ggcagtggcagtgaaaggccggaga

SEQ ID NO: 4157 - DNA, 25 bp, synthetic construct
  source 1..25: mol_type = other DNA; mol_type = other DNA
ggcagtggcagtgaagagccggaga

SEQ ID NO: 4158 - DNA, 25 bp, synthetic construct
  source 1..25: mol_type = other DNA; mol_type = other DNA
ggcagtggcagtgaaggaccggaga

SEQ ID NO: 4159 - DNA, 25 bp, synthetic construct
  source 1..25: mol_type = other DNA; mol_type = other DNA
ggcagtggcagtgaagggccagaga

SEQ ID NO: 4160 - DNA, 25 bp, synthetic construct
  source 1..25: mol_type = other DNA; mol_type = other DNA
ggcagtggcagtgaagggccgaaga

SEQ ID NO: 4161 - DNA, 25 bp, synthetic construct
  source 1..25: mol_type = other DNA; mol_type = other DNA
ggcagtggcagtgaagggccggaaa

SEQ ID NO: 4162 - DNA, 25 bp, synthetic construct
  source 1..25: mol_type = other DNA; mol_type = other DNA
ggcagtggcagtgagaagccggaga

SEQ ID NO: 4163 - DNA, 25 bp, synthetic construct
  source 1..25: mol_type = other DNA; mol_type = other DNA
ggcagtggcagtgagagaccggaga

SEQ ID NO: 4164 - DNA, 25 bp, synthetic construct
  source 1..25: mol_type = other DNA; mol_type = other DNA
ggcagtggcagtgagaggccagaga

SEQ ID NO: 4165 - DNA, 25 bp, synthetic construct
  source 1..25: mol_type = other DNA; mol_type = other DNA
ggcagtggcagtgagaggccgaaga

SEQ ID NO: 4166 - DNA, 25 bp, synthetic construct
  source 1..25: mol_type = other DNA; mol_type = other DNA
ggcagtggcagtgagaggccggaaa

SEQ ID NO: 4167 - DNA, 25 bp, synthetic construct
  source 1..25: mol_type = other DNA; mol_type = other DNA
ggcagtggcagtgaggaaccggaga

SEQ ID NO: 4168 - DNA, 25 bp, synthetic construct
  source 1..25: mol_type = other DNA; mol_type = other DNA
ggcagtggcagtgaggagccagaga

SEQ ID NO: 4169 - DNA, 25 bp, synthetic construct
  source 1..25: mol_type = other DNA; mol_type = other DNA
ggcagtggcagtgaggagccgaaga

SEQ ID NO: 4170 - DNA, 25 bp, synthetic construct
  source 1..25: mol_type = other DNA; mol_type = other DNA
ggcagtggcagtgaggagccggaaa

SEQ ID NO: 4171 - DNA, 25 bp, synthetic construct
  source 1..25: mol_type = other DNA; mol_type = other DNA
ggcagtggcagtgagggaccagaga

SEQ ID NO: 4172 - DNA, 25 bp, synthetic construct
  source 1..25: mol_type = other DNA; mol_type = other DNA
ggcagtggcagtgagggaccgaaga

SEQ ID NO: 4173 - DNA, 25 bp, synthetic construct
  source 1..25: mol_type = other DNA; mol_type = other DNA
ggcagtggcagtgagggaccggaaa

SEQ ID NO: 4174 - DNA, 25 bp, synthetic construct
  source 1..25: mol_type = other DNA; mol_type = other DNA
gacagtggcagtgaagggccggaga

SEQ ID NO: 4175 - DNA, 25 bp, synthetic construct
  source 1..25: mol_type = other DNA; mol_type = other DNA
gacagtggcagtgagaggccggaga

SEQ ID NO: 4176 - DNA, 25 bp, synthetic construct
  source 1..25: mol_type = other DNA; mol_type = other DNA
gacagtggcagtgaggagccggaga

SEQ ID NO: 4177 - DNA, 25 bp, synthetic construct
  source 1..25: mol_type = other DNA; mol_type = other DNA
gacagtggcagtgagggaccggaga

SEQ ID NO: 4178 - DNA, 25 bp, synthetic construct
  source 1..25: mol_type = other DNA; mol_type = other DNA
ggcaatggcagtgaagggccggaga

SEQ ID NO: 4179 - DNA, 25 bp, synthetic construct
  source 1..25: mol_type = other DNA; mol_type = other DNA
ggcaatggcagtgagaggccggaga

SEQ ID NO: 4180 - DNA, 25 bp, synthetic construct
  source 1..25: mol_type = other DNA; mol_type = other DNA
ggcaatggcagtgaggagccggaga

SEQ ID NO: 4181 - DNA, 25 bp, synthetic construct
  source 1..25: mol_type = other DNA; mol_type = other DNA
ggcaatggcagtgagggaccggaga

SEQ ID NO: 4182 - DNA, 25 bp, synthetic construct
  source 1..25: mol_type = other DNA; mol_type = other DNA
ggcagtagcagtgaagggccggaga

SEQ ID NO: 4183 - DNA, 25 bp, synthetic construct
  source 1..25: mol_type = other DNA; mol_type = other DNA
ggcagtagcagtgagaggccggaga

SEQ ID NO: 4184 - DNA, 25 bp, synthetic construct
  source 1..25: mol_type = other DNA; mol_type = other DNA
ggcagtagcagtgaggagccggaga

SEQ ID NO: 4185 - DNA, 25 bp, synthetic construct
  source 1..25: mol_type = other DNA; mol_type = other DNA
ggcagtagcagtgagggaccggaga

SEQ ID NO: 4186 - DNA, 25 bp, synthetic construct
  source 1..25: mol_type = other DNA; mol_type = other DNA
ggcagtgacagtgaagggccggaga

SEQ ID NO: 4187 - DNA, 25 bp, synthetic construct
  source 1..25: mol_type = other DNA; mol_type = other DNA
ggcagtgacagtgagaggccggaga

SEQ ID NO: 4188 - DNA, 25 bp, synthetic construct
  source 1..25: mol_type = other DNA; mol_type = other DNA
ggcagtgacagtgaggagccggaga

SEQ ID NO: 4189 - DNA, 25 bp, synthetic construct
  source 1..25: mol_type = other DNA; mol_type = other DNA
ggcagtgacagtgagggaccggaga

SEQ ID NO: 4190 - DNA, 18 bp, synthetic construct
  source 1..18: mol_type = other DNA; mol_type = other DNA
gctgcagtgggaccagtg

SEQ ID NO: 4191 - DNA, 18 bp, synthetic construct
  source 1..18: mol_type = other DNA; mol_type = other DNA
actgcagtgggaccagtg

SEQ ID NO: 4192 - DNA, 18 bp, synthetic construct
  source 1..18: mol_type = other DNA; mol_type = other DNA
gctgcagtgagaccagtg

SEQ ID NO: 4193 - DNA, 18 bp, synthetic construct
  source 1..18: mol_type = other DNA; mol_type = other DNA
gctgcagtggaaccagtg

SEQ ID NO: 4194 - DNA, 18 bp, synthetic construct
  source 1..18: mol_type = other DNA; mol_type = other DNA
gctgcagtgggaacagtg

SEQ ID NO: 4195 - DNA, 18 bp, synthetic construct
  source 1..18: mol_type = other DNA; mol_type = other DNA
gctgcagtgggacaagtg

SEQ ID NO: 4196 - DNA, 18 bp, synthetic construct
  source 1..18: mol_type = other DNA; mol_type = other DNA
gctgcagtgggaccaatg

SEQ ID NO: 4197 - DNA, 18 bp, synthetic construct
  source 1..18: mol_type = other DNA; mol_type = other DNA
gctgcagtgggaccagta

SEQ ID NO: 4198 - DNA, 18 bp, synthetic construct
  source 1..18: mol_type = other DNA; mol_type = other DNA
gatgcagtgggaccagtg

SEQ ID NO: 4199 - DNA, 18 bp, synthetic construct
  source 1..18: mol_type = other DNA; mol_type = other DNA
gctacagtgggaccagtg

SEQ ID NO: 4200 - DNA, 18 bp, synthetic construct
  source 1..18: mol_type = other DNA; mol_type = other DNA
gctgaagtgggaccagtg

SEQ ID NO: 4201 - DNA, 18 bp, synthetic construct
  source 1..18: mol_type = other DNA; mol_type = other DNA
gctgcaatgggaccagtg

SEQ ID NO: 4202 - DNA, 18 bp, synthetic construct
  source 1..18: mol_type = other DNA; mol_type = other DNA
gctgcagtaggaccagtg

SEQ ID NO: 4203 - DNA, 18 bp, synthetic construct
  source 1..18: mol_type = other DNA; mol_type = other DNA
agctgcagtgggaccagt

SEQ ID NO: 4204 - DNA, 18 bp, synthetic construct
  source 1..18: mol_type = other DNA; mol_type = other DNA
agctgcagttggaccagt

SEQ ID NO: 4205 - DNA, 18 bp, synthetic construct
  source 1..18: mol_type = other DNA; mol_type = other DNA
agctgcagtgtgaccagt

SEQ ID NO: 4206 - DNA, 18 bp, synthetic construct
  source 1..18: mol_type = other DNA; mol_type = other DNA
agctgcagtggtaccagt

SEQ ID NO: 4207 - DNA, 18 bp, synthetic construct
  source 1..18: mol_type = other DNA; mol_type = other DNA
agctgcagtgggatcagt

SEQ ID NO: 4208 - DNA, 18 bp, synthetic construct
  source 1..18: mol_type = other DNA; mol_type = other DNA
agctgcagtgggactagt

SEQ ID NO: 4209 - DNA, 18 bp, synthetic construct
  source 1..18: mol_type = other DNA; mol_type = other DNA
agctgcagtgggaccatt

SEQ ID NO: 4210 - DNA, 18 bp, synthetic construct
  source 1..18: mol_type = other DNA; mol_type = other DNA
atctgcagtgggaccagt

SEQ ID NO: 4211 - DNA, 18 bp, synthetic construct
  source 1..18: mol_type = other DNA; mol_type = other DNA
agttgcagtgggaccagt

SEQ ID NO: 4212 - DNA, 18 bp, synthetic construct
  source 1..18: mol_type = other DNA; mol_type = other DNA
agcttcagtgggaccagt

SEQ ID NO: 4213 - DNA, 18 bp, synthetic construct
  source 1..18: mol_type = other DNA; mol_type = other DNA
agctgtagtgggaccagt

SEQ ID NO: 4214 - DNA, 18 bp, synthetic construct
  source 1..18: mol_type = other DNA; mol_type = other DNA
agctgcattgggaccagt

SEQ ID NO: 4215 - DNA, 18 bp, synthetic construct
  source 1..18: mol_type = other DNA; mol_type = other DNA
agctgcagtgggaccaat

SEQ ID NO: 4216 - DNA, 18 bp, synthetic construct
  source 1..18: mol_type = other DNA; mol_type = other DNA
cagctgcagtgggaccag

SEQ ID NO: 4217 - DNA, 18 bp, synthetic construct
  source 1..18: mol_type = other DNA; mol_type = other DNA
tagctgcagtgggaccag

SEQ ID NO: 4218 - DNA, 18 bp, synthetic construct
  source 1..18: mol_type = other DNA; mol_type = other DNA
cagctgcagttggaccag

SEQ ID NO: 4219 - DNA, 18 bp, synthetic construct
  source 1..18: mol_type = other DNA; mol_type = other DNA
cagctgcagtgtgaccag

SEQ ID NO: 4220 - DNA, 18 bp, synthetic construct
  source 1..18: mol_type = other DNA; mol_type = other DNA
cagctgcagtggtaccag

SEQ ID NO: 4221 - DNA, 18 bp, synthetic construct
  source 1..18: mol_type = other DNA; mol_type = other DNA
cagctgcagtgggatcag

SEQ ID NO: 4222 - DNA, 18 bp, synthetic construct
  source 1..18: mol_type = other DNA; mol_type = other DNA
cagctgcagtgggactag

SEQ ID NO: 4223 - DNA, 18 bp, synthetic construct
  source 1..18: mol_type = other DNA; mol_type = other DNA
cagctgcagtgggaccat

SEQ ID NO: 4224 - DNA, 18 bp, synthetic construct
  source 1..18: mol_type = other DNA; mol_type = other DNA
catctgcagtgggaccag

SEQ ID NO: 4225 - DNA, 18 bp, synthetic construct
  source 1..18: mol_type = other DNA; mol_type = other DNA
cagttgcagtgggaccag

SEQ ID NO: 4226 - DNA, 18 bp, synthetic construct
  source 1..18: mol_type = other DNA; mol_type = other DNA
cagcttcagtgggaccag

SEQ ID NO: 4227 - DNA, 18 bp, synthetic construct
  source 1..18: mol_type = other DNA; mol_type = other DNA
cagctgtagtgggaccag

SEQ ID NO: 4228 - DNA, 18 bp, synthetic construct
  source 1..18: mol_type = other DNA; mol_type = other DNA
cagctgcattgggaccag

SEQ ID NO: 4229 - DNA, 18 bp, synthetic construct
  source 1..18: mol_type = other DNA; mol_type = other DNA
cagctgcagtgggaccaa

SEQ ID NO: 4230 - DNA, 18 bp, synthetic construct
  source 1..18: mol_type = other DNA; mol_type = other DNA
gcagctgcagtgggacca

SEQ ID NO: 4231 - DNA, 18 bp, synthetic construct
  source 1..18: mol_type = other DNA; mol_type = other DNA
tcagctgcagtgggacca

SEQ ID NO: 4232 - DNA, 18 bp, synthetic construct
  source 1..18: mol_type = other DNA; mol_type = other DNA
gcagctgcattgggacca

SEQ ID NO: 4233 - DNA, 18 bp, synthetic construct
  source 1..18: mol_type = other DNA; mol_type = other DNA
gcagctgcagttggacca

SEQ ID NO: 4234 - DNA, 18 bp, synthetic construct
  source 1..18: mol_type = other DNA; mol_type = other DNA
gcagctgcagtgtgacca

SEQ ID NO: 4235 - DNA, 18 bp, synthetic construct
  source 1..18: mol_type = other DNA; mol_type = other DNA
gcagctgcagtggtacca

SEQ ID NO: 4236 - DNA, 18 bp, synthetic construct
  source 1..18: mol_type = other DNA; mol_type = other DNA
gcagctgcagtgggatca

SEQ ID NO: 4237 - DNA, 18 bp, synthetic construct
  source 1..18: mol_type = other DNA; mol_type = other DNA
gcagctgcagtgggacta

SEQ ID NO: 4238 - DNA, 18 bp, synthetic construct
  source 1..18: mol_type = other DNA; mol_type = other DNA
gtagctgcagtgggacca

SEQ ID NO: 4239 - DNA, 18 bp, synthetic construct
  source 1..18: mol_type = other DNA; mol_type = other DNA
gcatctgcagtgggacca

SEQ ID NO: 4240 - DNA, 18 bp, synthetic construct
  source 1..18: mol_type = other DNA; mol_type = other DNA
gcagttgcagtgggacca

SEQ ID NO: 4241 - DNA, 18 bp, synthetic construct
  source 1..18: mol_type = other DNA; mol_type = other DNA
gcagcttcagtgggacca

SEQ ID NO: 4242 - DNA, 18 bp, synthetic construct
  source 1..18: mol_type = other DNA; mol_type = other DNA
gcagctgtagtgggacca

SEQ ID NO: 4243 - DNA, 18 bp, synthetic construct
  source 1..18: mol_type = other DNA; mol_type = other DNA
gcagctgcagtggaacca

SEQ ID NO: 4244 - DNA, 18 bp, synthetic construct
  source 1..18: mol_type = other DNA; mol_type = other DNA
ggcagctgcagtgggacc

SEQ ID NO: 4245 - DNA, 18 bp, synthetic construct
  source 1..18: mol_type = other DNA; mol_type = other DNA
tgcagctgcagtgggacc

SEQ ID NO: 4246 - DNA, 18 bp, synthetic construct
  source 1..18: mol_type = other DNA; mol_type = other DNA
ggcagctgcattgggacc

SEQ ID NO: 4247 - DNA, 18 bp, synthetic construct
  source 1..18: mol_type = other DNA; mol_type = other DNA
ggcagctgcagttggacc

SEQ ID NO: 4248 - DNA, 18 bp, synthetic construct
  source 1..18: mol_type = other DNA; mol_type = other DNA
ggcagctgcagtgtgacc

SEQ ID NO: 4249 - DNA, 18 bp, synthetic construct
  source 1..18: mol_type = other DNA; mol_type = other DNA
ggcagctgcagtggtacc

SEQ ID NO: 4250 - DNA, 18 bp, synthetic construct
  source 1..18: mol_type = other DNA; mol_type = other DNA
ggcagctgcagtgggatc

SEQ ID NO: 4251 - DNA, 18 bp, synthetic construct
  source 1..18: mol_type = other DNA; mol_type = other DNA
ggcagctgcagtgggact

SEQ ID NO: 4252 - DNA, 18 bp, synthetic construct
  source 1..18: mol_type = other DNA; mol_type = other DNA
gtcagctgcagtgggacc

SEQ ID NO: 4253 - DNA, 18 bp, synthetic construct
  source 1..18: mol_type = other DNA; mol_type = other DNA
ggtagctgcagtgggacc

SEQ ID NO: 4254 - DNA, 18 bp, synthetic construct
  source 1..18: mol_type = other DNA; mol_type = other DNA
ggcatctgcagtgggacc

SEQ ID NO: 4255 - DNA, 18 bp, synthetic construct
  source 1..18: mol_type = other DNA; mol_type = other DNA
ggcagttgcagtgggacc

SEQ ID NO: 4256 - DNA, 18 bp, synthetic construct
  source 1..18: mol_type = other DNA; mol_type = other DNA
ggcagcttcagtgggacc

SEQ ID NO: 4257 - DNA, 18 bp, synthetic construct
  source 1..18: mol_type = other DNA; mol_type = other DNA
ggcagctgtagtgggacc

SEQ ID NO: 4258 - DNA, 18 bp, synthetic construct
  source 1..18: mol_type = other DNA; mol_type = other DNA
ggcagctgcagtggaacc

SEQ ID NO: 4259 - DNA, 18 bp, synthetic construct
  source 1..18: mol_type = other DNA; mol_type = other DNA
gggcagctgcagtgggac

SEQ ID NO: 4260 - DNA, 18 bp, synthetic construct
  source 1..18: mol_type = other DNA; mol_type = other DNA
tggcagctgcagtgggac

SEQ ID NO: 4261 - DNA, 18 bp, synthetic construct
  source 1..18: mol_type = other DNA; mol_type = other DNA
gggcagctgtagtgggac

SEQ ID NO: 4262 - DNA, 18 bp, synthetic construct
  source 1..18: mol_type = other DNA; mol_type = other DNA
gggcagctgcattgggac

SEQ ID NO: 4263 - DNA, 18 bp, synthetic construct
  source 1..18: mol_type = other DNA; mol_type = other DNA
gggcagctgcagttggac

SEQ ID NO: 4264 - DNA, 18 bp, synthetic construct
  source 1..18: mol_type = other DNA; mol_type = other DNA
gggcagctgcagtgtgac

SEQ ID NO: 4265 - DNA, 18 bp, synthetic construct
  source 1..18: mol_type = other DNA; mol_type = other DNA
gggcagctgcagtggtac

SEQ ID NO: 4266 - DNA, 18 bp, synthetic construct
  source 1..18: mol_type = other DNA; mol_type = other DNA
gggcagctgcagtgggat

SEQ ID NO: 4267 - DNA, 18 bp, synthetic construct
  source 1..18: mol_type = other DNA; mol_type = other DNA
gtgcagctgcagtgggac

SEQ ID NO: 4268 - DNA, 18 bp, synthetic construct
  source 1..18: mol_type = other DNA; mol_type = other DNA
ggtcagctgcagtgggac

SEQ ID NO: 4269 - DNA, 18 bp, synthetic construct
  source 1..18: mol_type = other DNA; mol_type = other DNA
gggtagctgcagtgggac

SEQ ID NO: 4270 - DNA, 18 bp, synthetic construct
  source 1..18: mol_type = other DNA; mol_type = other DNA
gggcatctgcagtgggac

SEQ ID NO: 4271 - DNA, 18 bp, synthetic construct
  source 1..18: mol_type = other DNA; mol_type = other DNA
gggcagttgcagtgggac

SEQ ID NO: 4272 - DNA, 18 bp, synthetic construct
  source 1..18: mol_type = other DNA; mol_type = other DNA
gggcagcttcagtgggac

SEQ ID NO: 4273 - DNA, 18 bp, synthetic construct
  source 1..18: mol_type = other DNA; mol_type = other DNA
gggcagctgcagtggaac

SEQ ID NO: 4274 - DNA, 18 bp, synthetic construct
  source 1..18: mol_type = other DNA; mol_type = other DNA
tgggcagctgcagtggga

SEQ ID NO: 4275 - DNA, 18 bp, synthetic construct
  source 1..18: mol_type = other DNA; mol_type = other DNA
tgggcagctacagtggga

SEQ ID NO: 4276 - DNA, 18 bp, synthetic construct
  source 1..18: mol_type = other DNA; mol_type = other DNA
tgggcagctgaagtggga

SEQ ID NO: 4277 - DNA, 18 bp, synthetic construct
  source 1..18: mol_type = other DNA; mol_type = other DNA
tgggcagctgcaatggga

SEQ ID NO: 4278 - DNA, 18 bp, synthetic construct
  source 1..18: mol_type = other DNA; mol_type = other DNA
tgggcagctgcagtagga

SEQ ID NO: 4279 - DNA, 18 bp, synthetic construct
  source 1..18: mol_type = other DNA; mol_type = other DNA
tgggcagctgcagtgaga

SEQ ID NO: 4280 - DNA, 18 bp, synthetic construct
  source 1..18: mol_type = other DNA; mol_type = other DNA
tgggcagctgcagtggaa

SEQ ID NO: 4281 - DNA, 18 bp, synthetic construct
  source 1..18: mol_type = other DNA; mol_type = other DNA
taggcagctgcagtggga

SEQ ID NO: 4282 - DNA, 18 bp, synthetic construct
  source 1..18: mol_type = other DNA; mol_type = other DNA
tgagcagctgcagtggga

SEQ ID NO: 4283 - DNA, 18 bp, synthetic construct
  source 1..18: mol_type = other DNA; mol_type = other DNA
tggacagctgcagtggga

SEQ ID NO: 4284 - DNA, 18 bp, synthetic construct
  source 1..18: mol_type = other DNA; mol_type = other DNA
tgggaagctgcagtggga

SEQ ID NO: 4285 - DNA, 18 bp, synthetic construct
  source 1..18: mol_type = other DNA; mol_type = other DNA
tgggcaactgcagtggga

SEQ ID NO: 4286 - DNA, 18 bp, synthetic construct
  source 1..18: mol_type = other DNA; mol_type = other DNA
tgggcagatgcagtggga

SEQ ID NO: 4287 - DNA, 18 bp, synthetic construct
  source 1..18: mol_type = other DNA; mol_type = other DNA
ctgggcagctgcagtggg

SEQ ID NO: 4288 - DNA, 18 bp, synthetic construct
  source 1..18: mol_type = other DNA; mol_type = other DNA
atgggcagctgcagtggg

SEQ ID NO: 4289 - DNA, 18 bp, synthetic construct
  source 1..18: mol_type = other DNA; mol_type = other DNA
ctgggcagctacagtggg

SEQ ID NO: 4290 - DNA, 18 bp, synthetic construct
  source 1..18: mol_type = other DNA; mol_type = other DNA
ctgggcagctgaagtggg

SEQ ID NO: 4291 - DNA, 18 bp, synthetic construct
  source 1..18: mol_type = other DNA; mol_type = other DNA
ctgggcagctgcaatggg

SEQ ID NO: 4292 - DNA, 18 bp, synthetic construct
  source 1..18: mol_type = other DNA; mol_type = other DNA
ctgggcagctgcagtagg

SEQ ID NO: 4293 - DNA, 18 bp, synthetic construct
  source 1..18: mol_type = other DNA; mol_type = other DNA
ctgggcagctgcagtgag

SEQ ID NO: 4294 - DNA, 18 bp, synthetic construct
  source 1..18: mol_type = other DNA; mol_type = other DNA
ctgggcagctgcagtgga

SEQ ID NO: 4295 - DNA, 18 bp, synthetic construct
  source 1..18: mol_type = other DNA; mol_type = other DNA
ctaggcagctgcagtggg

SEQ ID NO: 4296 - DNA, 18 bp, synthetic construct
  source 1..18: mol_type = other DNA; mol_type = other DNA
ctgagcagctgcagtggg

SEQ ID NO: 4297 - DNA, 18 bp, synthetic construct
  source 1..18: mol_type = other DNA; mol_type = other DNA
ctggacagctgcagtggg

SEQ ID NO: 4298 - DNA, 18 bp, synthetic construct
  source 1..18: mol_type = other DNA; mol_type = other DNA
ctgggaagctgcagtggg

SEQ ID NO: 4299 - DNA, 18 bp, synthetic construct
  source 1..18: mol_type = other DNA; mol_type = other DNA
ctgggcaactgcagtggg

SEQ ID NO: 4300 - DNA, 18 bp, synthetic construct
  source 1..18: mol_type = other DNA; mol_type = other DNA
ctgggcagatgcagtggg

SEQ ID NO: 4301 - DNA, 18 bp, synthetic construct
  source 1..18: mol_type = other DNA; mol_type = other DNA
actgggcagctgcagtgg

SEQ ID NO: 4302 - DNA, 18 bp, synthetic construct
  source 1..18: mol_type = other DNA; mol_type = other DNA
actgggcagatgcagtgg

SEQ ID NO: 4303 - DNA, 18 bp, synthetic construct
  source 1..18: mol_type = other DNA; mol_type = other DNA
actgggcagctacagtgg

SEQ ID NO: 4304 - DNA, 18 bp, synthetic construct
  source 1..18: mol_type = other DNA; mol_type = other DNA
actgggcagctgaagtgg

SEQ ID NO: 4305 - DNA, 18 bp, synthetic construct
  source 1..18: mol_type = other DNA; mol_type = other DNA
actgggcagctgcaatgg

SEQ ID NO: 4306 - DNA, 18 bp, synthetic construct
  source 1..18: mol_type = other DNA; mol_type = other DNA
actgggcagctgcagtag

SEQ ID NO: 4307 - DNA, 18 bp, synthetic construct
  source 1..18: mol_type = other DNA; mol_type = other DNA
actgggcagctgcagtga

SEQ ID NO: 4308 - DNA, 18 bp, synthetic construct
  source 1..18: mol_type = other DNA; mol_type = other DNA
aatgggcagctgcagtgg

SEQ ID NO: 4309 - DNA, 18 bp, synthetic construct
  source 1..18: mol_type = other DNA; mol_type = other DNA
actaggcagctgcagtgg

SEQ ID NO: 4310 - DNA, 18 bp, synthetic construct
  source 1..18: mol_type = other DNA; mol_type = other DNA
actgagcagctgcagtgg

SEQ ID NO: 4311 - DNA, 18 bp, synthetic construct
  source 1..18: mol_type = other DNA; mol_type = other DNA
actggacagctgcagtgg

SEQ ID NO: 4312 - DNA, 18 bp, synthetic construct
  source 1..18: mol_type = other DNA; mol_type = other DNA
actgggaagctgcagtgg

SEQ ID NO: 4313 - DNA, 18 bp, synthetic construct
  source 1..18: mol_type = other DNA; mol_type = other DNA
actgggcaactgcagtgg

SEQ ID NO: 4314 - DNA, 18 bp, synthetic construct
  source 1..18: mol_type = other DNA; mol_type = other DNA
gactgggcagctgcagtg

SEQ ID NO: 4315 - DNA, 18 bp, synthetic construct
  source 1..18: mol_type = other DNA; mol_type = other DNA
aactgggcagctgcagtg

SEQ ID NO: 4316 - DNA, 18 bp, synthetic construct
  source 1..18: mol_type = other DNA; mol_type = other DNA
gactgggcaactgcagtg

SEQ ID NO: 4317 - DNA, 18 bp, synthetic construct
  source 1..18: mol_type = other DNA; mol_type = other DNA
gactgggcagatgcagtg

SEQ ID NO: 4318 - DNA, 18 bp, synthetic construct
  source 1..18: mol_type = other DNA; mol_type = other DNA
gactgggcagctacagtg

SEQ ID NO: 4319 - DNA, 18 bp, synthetic construct
  source 1..18: mol_type = other DNA; mol_type = other DNA
gactgggcagctgaagtg

SEQ ID NO: 4320 - DNA, 18 bp, synthetic construct
  source 1..18: mol_type = other DNA; mol_type = other DNA
gactgggcagctgcaatg

SEQ ID NO: 4321 - DNA, 18 bp, synthetic construct
  source 1..18: mol_type = other DNA; mol_type = other DNA
gactgggcagctgcagta

SEQ ID NO: 4322 - DNA, 18 bp, synthetic construct
  source 1..18: mol_type = other DNA; mol_type = other DNA
gaatgggcagctgcagtg

SEQ ID NO: 4323 - DNA, 18 bp, synthetic construct
  source 1..18: mol_type = other DNA; mol_type = other DNA
gactaggcagctgcagtg

SEQ ID NO: 4324 - DNA, 18 bp, synthetic construct
  source 1..18: mol_type = other DNA; mol_type = other DNA
gactgagcagctgcagtg

SEQ ID NO: 4325 - DNA, 18 bp, synthetic construct
  source 1..18: mol_type = other DNA; mol_type = other DNA
gactggacagctgcagtg

SEQ ID NO: 4326 - DNA, 18 bp, synthetic construct
  source 1..18: mol_type = other DNA; mol_type = other DNA
gactgggaagctgcagtg

SEQ ID NO: 4327 - DNA, 18 bp, synthetic construct
  source 1..18: mol_type = other DNA; mol_type = other DNA
agactgggcagctgcagt

SEQ ID NO: 4328 - DNA, 18 bp, synthetic construct
  source 1..18: mol_type = other DNA; mol_type = other DNA
agactgggcatctgcagt

SEQ ID NO: 4329 - DNA, 18 bp, synthetic construct
  source 1..18: mol_type = other DNA; mol_type = other DNA
agactgggcagttgcagt

SEQ ID NO: 4330 - DNA, 18 bp, synthetic construct
  source 1..18: mol_type = other DNA; mol_type = other DNA
agactgggcagcttcagt

SEQ ID NO: 4331 - DNA, 18 bp, synthetic construct
  source 1..18: mol_type = other DNA; mol_type = other DNA
agactgggcagctgtagt

SEQ ID NO: 4332 - DNA, 18 bp, synthetic construct
  source 1..18: mol_type = other DNA; mol_type = other DNA
agactgggcagctgcatt

SEQ ID NO: 4333 - DNA, 18 bp, synthetic construct
  source 1..18: mol_type = other DNA; mol_type = other DNA
atactgggcagctgcagt

SEQ ID NO: 4334 - DNA, 18 bp, synthetic construct
  source 1..18: mol_type = other DNA; mol_type = other DNA
agattgggcagctgcagt

SEQ ID NO: 4335 - DNA, 18 bp, synthetic construct
  source 1..18: mol_type = other DNA; mol_type = other DNA
agacttggcagctgcagt

SEQ ID NO: 4336 - DNA, 18 bp, synthetic construct
  source 1..18: mol_type = other DNA; mol_type = other DNA
agactgtgcagctgcagt

SEQ ID NO: 4337 - DNA, 18 bp, synthetic construct
  source 1..18: mol_type = other DNA; mol_type = other DNA
agactggtcagctgcagt

SEQ ID NO: 4338 - DNA, 18 bp, synthetic construct
  source 1..18: mol_type = other DNA; mol_type = other DNA
agactgggtagctgcagt

SEQ ID NO: 4339 - DNA, 18 bp, synthetic construct
  source 1..18: mol_type = other DNA; mol_type = other DNA
agactgggcagctgcaat

SEQ ID NO: 4340 - DNA, 18 bp, synthetic construct
  source 1..18: mol_type = other DNA; mol_type = other DNA
aagactgggcagctgcag

SEQ ID NO: 4341 - DNA, 18 bp, synthetic construct
  source 1..18: mol_type = other DNA; mol_type = other DNA
aagactgggtagctgcag

SEQ ID NO: 4342 - DNA, 18 bp, synthetic construct
  source 1..18: mol_type = other DNA; mol_type = other DNA
aagactgggcatctgcag

SEQ ID NO: 4343 - DNA, 18 bp, synthetic construct
  source 1..18: mol_type = other DNA; mol_type = other DNA
aagactgggcagttgcag

SEQ ID NO: 4344 - DNA, 18 bp, synthetic construct
  source 1..18: mol_type = other DNA; mol_type = other DNA
aagactgggcagcttcag

SEQ ID NO: 4345 - DNA, 18 bp, synthetic construct
  source 1..18: mol_type = other DNA; mol_type = other DNA
aagactgggcagctgtag

SEQ ID NO: 4346 - DNA, 18 bp, synthetic construct
  source 1..18: mol_type = other DNA; mol_type = other DNA
aagactgggcagctgcat

SEQ ID NO: 4347 - DNA, 18 bp, synthetic construct
  source 1..18: mol_type = other DNA; mol_type = other DNA
aatactgggcagctgcag

SEQ ID NO: 4348 - DNA, 18 bp, synthetic construct
  source 1..18: mol_type = other DNA; mol_type = other DNA
aagattgggcagctgcag

SEQ ID NO: 4349 - DNA, 18 bp, synthetic construct
  source 1..18: mol_type = other DNA; mol_type = other DNA
aagacttggcagctgcag

SEQ ID NO: 4350 - DNA, 18 bp, synthetic construct
  source 1..18: mol_type = other DNA; mol_type = other DNA
aagactgtgcagctgcag

SEQ ID NO: 4351 - DNA, 18 bp, synthetic construct
  source 1..18: mol_type = other DNA; mol_type = other DNA
aagactggtcagctgcag

SEQ ID NO: 4352 - DNA, 18 bp, synthetic construct
  source 1..18: mol_type = other DNA; mol_type = other DNA
aagactgggcagctgcaa

SEQ ID NO: 4353 - DNA, 18 bp, synthetic construct
  source 1..18: mol_type = other DNA; mol_type = other DNA
gaagactgggcagctgca

SEQ ID NO: 4354 - DNA, 18 bp, synthetic construct
  source 1..18: mol_type = other DNA; mol_type = other DNA
taagactgggcagctgca

SEQ ID NO: 4355 - DNA, 18 bp, synthetic construct
  source 1..18: mol_type = other DNA; mol_type = other DNA
gaagactggtcagctgca

SEQ ID NO: 4356 - DNA, 18 bp, synthetic construct
  source 1..18: mol_type = other DNA; mol_type = other DNA
gaagactgggtagctgca

SEQ ID NO: 4357 - DNA, 18 bp, synthetic construct
  source 1..18: mol_type = other DNA; mol_type = other DNA
gaagactgggcatctgca

SEQ ID NO: 4358 - DNA, 18 bp, synthetic construct
  source 1..18: mol_type = other DNA; mol_type = other DNA
gaagactgggcagttgca

SEQ ID NO: 4359 - DNA, 18 bp, synthetic construct
  source 1..18: mol_type = other DNA; mol_type = other DNA
gaagactgggcagcttca

SEQ ID NO: 4360 - DNA, 18 bp, synthetic construct
  source 1..18: mol_type = other DNA; mol_type = other DNA
gaagactgggcagctgta

SEQ ID NO: 4361 - DNA, 18 bp, synthetic construct
  source 1..18: mol_type = other DNA; mol_type = other DNA
gaatactgggcagctgca

SEQ ID NO: 4362 - DNA, 18 bp, synthetic construct
  source 1..18: mol_type = other DNA; mol_type = other DNA
gaagattgggcagctgca

SEQ ID NO: 4363 - DNA, 18 bp, synthetic construct
  source 1..18: mol_type = other DNA; mol_type = other DNA
gaagacttggcagctgca

SEQ ID NO: 4364 - DNA, 18 bp, synthetic construct
  source 1..18: mol_type = other DNA; mol_type = other DNA
gaagactgtgcagctgca

SEQ ID NO: 4365 - DNA, 18 bp, synthetic construct
  source 1..18: mol_type = other DNA; mol_type = other DNA
gaagactgggcagctaca

SEQ ID NO: 4366 - DNA, 18 bp, synthetic construct
  source 1..18: mol_type = other DNA; mol_type = other DNA
ggaagactgggcagctgc

SEQ ID NO: 4367 - DNA, 18 bp, synthetic construct
  source 1..18: mol_type = other DNA; mol_type = other DNA
tgaagactgggcagctgc

SEQ ID NO: 4368 - DNA, 18 bp, synthetic construct
  source 1..18: mol_type = other DNA; mol_type = other DNA
ggaagactgtgcagctgc

SEQ ID NO: 4369 - DNA, 18 bp, synthetic construct
  source 1..18: mol_type = other DNA; mol_type = other DNA
ggaagactggtcagctgc

SEQ ID NO: 4370 - DNA, 18 bp, synthetic construct
  source 1..18: mol_type = other DNA; mol_type = other DNA
ggaagactgggtagctgc

SEQ ID NO: 4371 - DNA, 18 bp, synthetic construct
  source 1..18: mol_type = other DNA; mol_type = other DNA
ggaagactgggcatctgc

SEQ ID NO: 4372 - DNA, 18 bp, synthetic construct
  source 1..18: mol_type = other DNA; mol_type = other DNA
ggaagactgggcagttgc

SEQ ID NO: 4373 - DNA, 18 bp, synthetic construct
  source 1..18: mol_type = other DNA; mol_type = other DNA
ggaagactgggcagcttc

SEQ ID NO: 4374 - DNA, 18 bp, synthetic construct
  source 1..18: mol_type = other DNA; mol_type = other DNA
ggaagactgggcagctgt

SEQ ID NO: 4375 - DNA, 18 bp, synthetic construct
  source 1..18: mol_type = other DNA; mol_type = other DNA
gtaagactgggcagctgc

SEQ ID NO: 4376 - DNA, 18 bp, synthetic construct
  source 1..18: mol_type = other DNA; mol_type = other DNA
ggaatactgggcagctgc

SEQ ID NO: 4377 - DNA, 18 bp, synthetic construct
  source 1..18: mol_type = other DNA; mol_type = other DNA
ggaagattgggcagctgc

SEQ ID NO: 4378 - DNA, 18 bp, synthetic construct
  source 1..18: mol_type = other DNA; mol_type = other DNA
ggaagacttggcagctgc

SEQ ID NO: 4379 - DNA, 18 bp, synthetic construct
  source 1..18: mol_type = other DNA; mol_type = other DNA
ggaagactgggcagctac

SEQ ID NO: 4380 - DNA, 18 bp, synthetic construct
  source 1..18: mol_type = other DNA; mol_type = other DNA
tggaagactgggcagctg

SEQ ID NO: 4381 - DNA, 18 bp, synthetic construct
  source 1..18: mol_type = other DNA; mol_type = other DNA
tggaagacttggcagctg

SEQ ID NO: 4382 - DNA, 18 bp, synthetic construct
  source 1..18: mol_type = other DNA; mol_type = other DNA
tggaagactgtgcagctg

SEQ ID NO: 4383 - DNA, 18 bp, synthetic construct
  source 1..18: mol_type = other DNA; mol_type = other DNA
tggaagactggtcagctg

SEQ ID NO: 4384 - DNA, 18 bp, synthetic construct
  source 1..18: mol_type = other DNA; mol_type = other DNA
tggaagactgggtagctg

SEQ ID NO: 4385 - DNA, 18 bp, synthetic construct
  source 1..18: mol_type = other DNA; mol_type = other DNA
tggaagactgggcatctg

SEQ ID NO: 4386 - DNA, 18 bp, synthetic construct
  source 1..18: mol_type = other DNA; mol_type = other DNA
tggaagactgggcagttg

SEQ ID NO: 4387 - DNA, 18 bp, synthetic construct
  source 1..18: mol_type = other DNA; mol_type = other DNA
tggaagactgggcagctt

SEQ ID NO: 4388 - DNA, 18 bp, synthetic construct
  source 1..18: mol_type = other DNA; mol_type = other DNA
ttgaagactgggcagctg

SEQ ID NO: 4389 - DNA, 18 bp, synthetic construct
  source 1..18: mol_type = other DNA; mol_type = other DNA
tgtaagactgggcagctg

SEQ ID NO: 4390 - DNA, 18 bp, synthetic construct
  source 1..18: mol_type = other DNA; mol_type = other DNA
tggaatactgggcagctg

SEQ ID NO: 4391 - DNA, 18 bp, synthetic construct
  source 1..18: mol_type = other DNA; mol_type = other DNA
tggaagattgggcagctg

SEQ ID NO: 4392 - DNA, 18 bp, synthetic construct
  source 1..18: mol_type = other DNA; mol_type = other DNA
tggaagactgggcagcta

SEQ ID NO: 4393 - DNA, 18 bp, synthetic construct
  source 1..18: mol_type = other DNA; mol_type = other DNA
atggaagactgggcagct

SEQ ID NO: 4394 - DNA, 18 bp, synthetic construct
  source 1..18: mol_type = other DNA; mol_type = other DNA
atggaagacttggcagct

SEQ ID NO: 4395 - DNA, 18 bp, synthetic construct
  source 1..18: mol_type = other DNA; mol_type = other DNA
atggaagactgtgcagct

SEQ ID NO: 4396 - DNA, 18 bp, synthetic construct
  source 1..18: mol_type = other DNA; mol_type = other DNA
atggaagactggtcagct

SEQ ID NO: 4397 - DNA, 18 bp, synthetic construct
  source 1..18: mol_type = other DNA; mol_type = other DNA
atggaagactgggtagct

SEQ ID NO: 4398 - DNA, 18 bp, synthetic construct
  source 1..18: mol_type = other DNA; mol_type = other DNA
atggaagactgggcatct

SEQ ID NO: 4399 - DNA, 18 bp, synthetic construct
  source 1..18: mol_type = other DNA; mol_type = other DNA
atggaagactgggcagtt

SEQ ID NO: 4400 - DNA, 18 bp, synthetic construct
  source 1..18: mol_type = other DNA; mol_type = other DNA
attgaagactgggcagct

SEQ ID NO: 4401 - DNA, 18 bp, synthetic construct
  source 1..18: mol_type = other DNA; mol_type = other DNA
atgtaagactgggcagct

SEQ ID NO: 4402 - DNA, 18 bp, synthetic construct
  source 1..18: mol_type = other DNA; mol_type = other DNA
atggaatactgggcagct

SEQ ID NO: 4403 - DNA, 18 bp, synthetic construct
  source 1..18: mol_type = other DNA; mol_type = other DNA
atggaagattgggcagct

SEQ ID NO: 4404 - DNA, 18 bp, synthetic construct
  source 1..18: mol_type = other DNA; mol_type = other DNA
atggaagactgggcaact

SEQ ID NO: 4405 - DNA, 18 bp, synthetic construct
  source 1..18: mol_type = other DNA; mol_type = other DNA
gatggaagactgggcagc

SEQ ID NO: 4406 - DNA, 18 bp, synthetic construct
  source 1..18: mol_type = other DNA; mol_type = other DNA
tatggaagactgggcagc

SEQ ID NO: 4407 - DNA, 18 bp, synthetic construct
  source 1..18: mol_type = other DNA; mol_type = other DNA
gatggaagattgggcagc

SEQ ID NO: 4408 - DNA, 18 bp, synthetic construct
  source 1..18: mol_type = other DNA; mol_type = other DNA
gatggaagacttggcagc

SEQ ID NO: 4409 - DNA, 18 bp, synthetic construct
  source 1..18: mol_type = other DNA; mol_type = other DNA
gatggaagactgtgcagc

SEQ ID NO: 4410 - DNA, 18 bp, synthetic construct
  source 1..18: mol_type = other DNA; mol_type = other DNA
gatggaagactggtcagc

SEQ ID NO: 4411 - DNA, 18 bp, synthetic construct
  source 1..18: mol_type = other DNA; mol_type = other DNA
gatggaagactgggtagc

SEQ ID NO: 4412 - DNA, 18 bp, synthetic construct
  source 1..18: mol_type = other DNA; mol_type = other DNA
gatggaagactgggcatc

SEQ ID NO: 4413 - DNA, 18 bp, synthetic construct
  source 1..18: mol_type = other DNA; mol_type = other DNA
gatggaagactgggcagt

SEQ ID NO: 4414 - DNA, 18 bp, synthetic construct
  source 1..18: mol_type = other DNA; mol_type = other DNA
gattgaagactgggcagc

SEQ ID NO: 4415 - DNA, 18 bp, synthetic construct
  source 1..18: mol_type = other DNA; mol_type = other DNA
gatgtaagactgggcagc

SEQ ID NO: 4416 - DNA, 18 bp, synthetic construct
  source 1..18: mol_type = other DNA; mol_type = other DNA
gatggaatactgggcagc

SEQ ID NO: 4417 - DNA, 18 bp, synthetic construct
  source 1..18: mol_type = other DNA; mol_type = other DNA
gatggaagactgggcaac

SEQ ID NO: 4418 - DNA, 18 bp, synthetic construct
  source 1..18: mol_type = other DNA; mol_type = other DNA
agatggaagactgggcag

SEQ ID NO: 4419 - DNA, 18 bp, synthetic construct
  source 1..18: mol_type = other DNA; mol_type = other DNA
agatggaagattgggcag

SEQ ID NO: 4420 - DNA, 18 bp, synthetic construct
  source 1..18: mol_type = other DNA; mol_type = other DNA
agatggaagacttggcag

SEQ ID NO: 4421 - DNA, 18 bp, synthetic construct
  source 1..18: mol_type = other DNA; mol_type = other DNA
agatggaagactgtgcag

SEQ ID NO: 4422 - DNA, 18 bp, synthetic construct
  source 1..18: mol_type = other DNA; mol_type = other DNA
agatggaagactggtcag

SEQ ID NO: 4423 - DNA, 18 bp, synthetic construct
  source 1..18: mol_type = other DNA; mol_type = other DNA
agatggaagactgggtag

SEQ ID NO: 4424 - DNA, 18 bp, synthetic construct
  source 1..18: mol_type = other DNA; mol_type = other DNA
agatggaagactgggcat

SEQ ID NO: 4425 - DNA, 18 bp, synthetic construct
  source 1..18: mol_type = other DNA; mol_type = other DNA
atatggaagactgggcag

SEQ ID NO: 4426 - DNA, 18 bp, synthetic construct
  source 1..18: mol_type = other DNA; mol_type = other DNA
agattgaagactgggcag

SEQ ID NO: 4427 - DNA, 18 bp, synthetic construct
  source 1..18: mol_type = other DNA; mol_type = other DNA
agatgtaagactgggcag

SEQ ID NO: 4428 - DNA, 18 bp, synthetic construct
  source 1..18: mol_type = other DNA; mol_type = other DNA
agatggaatactgggcag

SEQ ID NO: 4429 - DNA, 18 bp, synthetic construct
  source 1..18: mol_type = other DNA; mol_type = other DNA
agatggaagactgggcaa

SEQ ID NO: 4430 - DNA, 18 bp, synthetic construct
  source 1..18: mol_type = other DNA; mol_type = other DNA
gagatggaagactgggca

SEQ ID NO: 4431 - DNA, 18 bp, synthetic construct
  source 1..18: mol_type = other DNA; mol_type = other DNA
tagatggaagactgggca

SEQ ID NO: 4432 - DNA, 18 bp, synthetic construct
  source 1..18: mol_type = other DNA; mol_type = other DNA
gagatggaatactgggca

SEQ ID NO: 4433 - DNA, 18 bp, synthetic construct
  source 1..18: mol_type = other DNA; mol_type = other DNA
gagatggaagattgggca

SEQ ID NO: 4434 - DNA, 18 bp, synthetic construct
  source 1..18: mol_type = other DNA; mol_type = other DNA
gagatggaagacttggca

SEQ ID NO: 4435 - DNA, 18 bp, synthetic construct
  source 1..18: mol_type = other DNA; mol_type = other DNA
gagatggaagactgtgca

SEQ ID NO: 4436 - DNA, 18 bp, synthetic construct
  source 1..18: mol_type = other DNA; mol_type = other DNA
gagatggaagactggtca

SEQ ID NO: 4437 - DNA, 18 bp, synthetic construct
  source 1..18: mol_type = other DNA; mol_type = other DNA
gagatggaagactgggta

SEQ ID NO: 4438 - DNA, 18 bp, synthetic construct
  source 1..18: mol_type = other DNA; mol_type = other DNA
gatatggaagactgggca

SEQ ID NO: 4439 - DNA, 18 bp, synthetic construct
  source 1..18: mol_type = other DNA; mol_type = other DNA
gagattgaagactgggca

SEQ ID NO: 4440 - DNA, 18 bp, synthetic construct
  source 1..18: mol_type = other DNA; mol_type = other DNA
gagatgtaagactgggca

SEQ ID NO: 4441 - DNA, 18 bp, synthetic construct
  source 1..18: mol_type = other DNA; mol_type = other DNA
gagatggaagactggaca

SEQ ID NO: 4442 - DNA, 18 bp, synthetic construct
  source 1..18: mol_type = other DNA; mol_type = other DNA
ggagatggaagactgggc

SEQ ID NO: 4443 - DNA, 18 bp, synthetic construct
  source 1..18: mol_type = other DNA; mol_type = other DNA
tgagatggaagactgggc

SEQ ID NO: 4444 - DNA, 18 bp, synthetic construct
  source 1..18: mol_type = other DNA; mol_type = other DNA
ggagatggaatactgggc

SEQ ID NO: 4445 - DNA, 18 bp, synthetic construct
  source 1..18: mol_type = other DNA; mol_type = other DNA
ggagatggaagattgggc

SEQ ID NO: 4446 - DNA, 18 bp, synthetic construct
  source 1..18: mol_type = other DNA; mol_type = other DNA
ggagatggaagacttggc

SEQ ID NO: 4447 - DNA, 18 bp, synthetic construct
  source 1..18: mol_type = other DNA; mol_type = other DNA
ggagatggaagactgtgc

SEQ ID NO: 4448 - DNA, 18 bp, synthetic construct
  source 1..18: mol_type = other DNA; mol_type = other DNA
ggagatggaagactggtc

SEQ ID NO: 4449 - DNA, 18 bp, synthetic construct
  source 1..18: mol_type = other DNA; mol_type = other DNA
ggagatggaagactgggt

SEQ ID NO: 4450 - DNA, 18 bp, synthetic construct
  source 1..18: mol_type = other DNA; mol_type = other DNA
gtagatggaagactgggc

SEQ ID NO: 4451 - DNA, 18 bp, synthetic construct
  source 1..18: mol_type = other DNA; mol_type = other DNA
ggatatggaagactgggc

SEQ ID NO: 4452 - DNA, 18 bp, synthetic construct
  source 1..18: mol_type = other DNA; mol_type = other DNA
ggagattgaagactgggc

SEQ ID NO: 4453 - DNA, 18 bp, synthetic construct
  source 1..18: mol_type = other DNA; mol_type = other DNA
ggagatgtaagactgggc

SEQ ID NO: 4454 - DNA, 18 bp, synthetic construct
  source 1..18: mol_type = other DNA; mol_type = other DNA
ggagatggaagactggac

SEQ ID NO: 4455 - DNA, 18 bp, synthetic construct
  source 1..18: mol_type = other DNA; mol_type = other DNA
cggagatggaagactggg

SEQ ID NO: 4456 - DNA, 18 bp, synthetic construct
  source 1..18: mol_type = other DNA; mol_type = other DNA
tggagatggaagactggg

SEQ ID NO: 4457 - DNA, 18 bp, synthetic construct
  source 1..18: mol_type = other DNA; mol_type = other DNA
cggagatggaatactggg

SEQ ID NO: 4458 - DNA, 18 bp, synthetic construct
  source 1..18: mol_type = other DNA; mol_type = other DNA
cggagatggaagattggg

SEQ ID NO: 4459 - DNA, 18 bp, synthetic construct
  source 1..18: mol_type = other DNA; mol_type = other DNA
cggagatggaagacttgg

SEQ ID NO: 4460 - DNA, 18 bp, synthetic construct
  source 1..18: mol_type = other DNA; mol_type = other DNA
cggagatggaagactgtg

SEQ ID NO: 4461 - DNA, 18 bp, synthetic construct
  source 1..18: mol_type = other DNA; mol_type = other DNA
cggagatggaagactggt

SEQ ID NO: 4462 - DNA, 18 bp, synthetic construct
  source 1..18: mol_type = other DNA; mol_type = other DNA
ctgagatggaagactggg

SEQ ID NO: 4463 - DNA, 18 bp, synthetic construct
  source 1..18: mol_type = other DNA; mol_type = other DNA
cgtagatggaagactggg

SEQ ID NO: 4464 - DNA, 18 bp, synthetic construct
  source 1..18: mol_type = other DNA; mol_type = other DNA
cggatatggaagactggg

SEQ ID NO: 4465 - DNA, 18 bp, synthetic construct
  source 1..18: mol_type = other DNA; mol_type = other DNA
cggagattgaagactggg

SEQ ID NO: 4466 - DNA, 18 bp, synthetic construct
  source 1..18: mol_type = other DNA; mol_type = other DNA
cggagatgtaagactggg

SEQ ID NO: 4467 - DNA, 18 bp, synthetic construct
  source 1..18: mol_type = other DNA; mol_type = other DNA
cggagatggaagactgga

SEQ ID NO: 4468 - DNA, 18 bp, synthetic construct
  source 1..18: mol_type = other DNA; mol_type = other DNA
ccggagatggaagactgg

SEQ ID NO: 4469 - DNA, 18 bp, synthetic construct
  source 1..18: mol_type = other DNA; mol_type = other DNA
tcggagatggaagactgg

SEQ ID NO: 4470 - DNA, 18 bp, synthetic construct
  source 1..18: mol_type = other DNA; mol_type = other DNA
ccggagatgtaagactgg

SEQ ID NO: 4471 - DNA, 18 bp, synthetic construct
  source 1..18: mol_type = other DNA; mol_type = other DNA
ccggagatggaatactgg

SEQ ID NO: 4472 - DNA, 18 bp, synthetic construct
  source 1..18: mol_type = other DNA; mol_type = other DNA
ccggagatggaagattgg

SEQ ID NO: 4473 - DNA, 18 bp, synthetic construct
  source 1..18: mol_type = other DNA; mol_type = other DNA
ccggagatggaagacttg

SEQ ID NO: 4474 - DNA, 18 bp, synthetic construct
  source 1..18: mol_type = other DNA; mol_type = other DNA
ccggagatggaagactgt

SEQ ID NO: 4475 - DNA, 18 bp, synthetic construct
  source 1..18: mol_type = other DNA; mol_type = other DNA
ctggagatggaagactgg

SEQ ID NO: 4476 - DNA, 18 bp, synthetic construct
  source 1..18: mol_type = other DNA; mol_type = other DNA
cctgagatggaagactgg

SEQ ID NO: 4477 - DNA, 18 bp, synthetic construct
  source 1..18: mol_type = other DNA; mol_type = other DNA
ccgtagatggaagactgg

SEQ ID NO: 4478 - DNA, 18 bp, synthetic construct
  source 1..18: mol_type = other DNA; mol_type = other DNA
ccggatatggaagactgg

SEQ ID NO: 4479 - DNA, 18 bp, synthetic construct
  source 1..18: mol_type = other DNA; mol_type = other DNA
ccggagattgaagactgg

SEQ ID NO: 4480 - DNA, 18 bp, synthetic construct
  source 1..18: mol_type = other DNA; mol_type = other DNA
ccggagatggaagactga

SEQ ID NO: 4481 - DNA, 18 bp, synthetic construct
  source 1..18: mol_type = other DNA; mol_type = other DNA
gccggagatggaagactg

SEQ ID NO: 4482 - DNA, 18 bp, synthetic construct
  source 1..18: mol_type = other DNA; mol_type = other DNA
tccggagatggaagactg

SEQ ID NO: 4483 - DNA, 18 bp, synthetic construct
  source 1..18: mol_type = other DNA; mol_type = other DNA
gccggagattgaagactg

SEQ ID NO: 4484 - DNA, 18 bp, synthetic construct
  source 1..18: mol_type = other DNA; mol_type = other DNA
gccggagatgtaagactg

SEQ ID NO: 4485 - DNA, 18 bp, synthetic construct
  source 1..18: mol_type = other DNA; mol_type = other DNA
gccggagatggaatactg

SEQ ID NO: 4486 - DNA, 18 bp, synthetic construct
  source 1..18: mol_type = other DNA; mol_type = other DNA
gccggagatggaagattg

SEQ ID NO: 4487 - DNA, 18 bp, synthetic construct
  source 1..18: mol_type = other DNA
gccggagatggaagactt

SEQ ID NO: 4488 - DNA, 18 bp, synthetic construct
  source 1..18: mol_type = other DNA
gtcggagatggaagactg

SEQ ID NO: 4489 - DNA, 18 bp, synthetic construct
  source 1..18: mol_type = other DNA
gctggagatggaagactg

SEQ ID NO: 4490 - DNA, 18 bp, synthetic construct
  source 1..18: mol_type = other DNA
gcctgagatggaagactg

SEQ ID NO: 4491 - DNA, 18 bp, synthetic construct
  source 1..18: mol_type = other DNA
gccgtagatggaagactg

SEQ ID NO: 4492 - DNA, 18 bp, synthetic construct
  source 1..18: mol_type = other DNA
gccggatatggaagactg

SEQ ID NO: 4493 - DNA, 18 bp, synthetic construct
  source 1..18: mol_type = other DNA
gccggagatggaagacta

SEQ ID NO: 4494 - DNA, 18 bp, synthetic construct
  source 1..18: mol_type = other DNA
ggccggagatggaagact

SEQ ID NO: 4495 - DNA, 18 bp, synthetic construct
  source 1..18: mol_type = other DNA
tgccggagatggaagact

SEQ ID NO: 4496 - DNA, 18 bp, synthetic construct
  source 1..18: mol_type = other DNA
ggccggagattgaagact

SEQ ID NO: 4497 - DNA, 18 bp, synthetic construct
  source 1..18: mol_type = other DNA
ggccggagatgtaagact

SEQ ID NO: 4498 - DNA, 18 bp, synthetic construct
  source 1..18: mol_type = other DNA
ggccggagatggaatact

SEQ ID NO: 4499 - DNA, 18 bp, synthetic construct
  source 1..18: mol_type = other DNA
ggccggagatggaagatt

SEQ ID NO: 4500 - DNA, 18 bp, synthetic construct
  source 1..18: mol_type = other DNA
gtccggagatggaagact

SEQ ID NO: 4501 - DNA, 18 bp, synthetic construct
  source 1..18: mol_type = other DNA
ggtcggagatggaagact

SEQ ID NO: 4502 - DNA, 18 bp, synthetic construct
  source 1..18: mol_type = other DNA
ggctggagatggaagact

SEQ ID NO: 4503 - DNA, 18 bp, synthetic construct
  source 1..18: mol_type = other DNA
ggcctgagatggaagact

SEQ ID NO: 4504 - DNA, 18 bp, synthetic construct
  source 1..18: mol_type = other DNA
ggccgtagatggaagact

SEQ ID NO: 4505 - DNA, 18 bp, synthetic construct
  source 1..18: mol_type = other DNA
ggccggatatggaagact

SEQ ID NO: 4506 - DNA, 18 bp, synthetic construct
  source 1..18: mol_type = other DNA
ggccggagatggaaaact

SEQ ID NO: 4507 - DNA, 18 bp, synthetic construct
  source 1..18: mol_type = other DNA
gggccggagatggaagac

SEQ ID NO: 4508 - DNA, 18 bp, synthetic construct
  source 1..18: mol_type = other DNA
tggccggagatggaagac

SEQ ID NO: 4509 - DNA, 18 bp, synthetic construct
  source 1..18: mol_type = other DNA
gggccggagattgaagac

SEQ ID NO: 4510 - DNA, 18 bp, synthetic construct
  source 1..18: mol_type = other DNA
gggccggagatgtaagac

SEQ ID NO: 4511 - DNA, 18 bp, synthetic construct
  source 1..18: mol_type = other DNA
gggccggagatggaatac

SEQ ID NO: 4512 - DNA, 18 bp, synthetic construct
  source 1..18: mol_type = other DNA
gggccggagatggaagat

SEQ ID NO: 4513 - DNA, 18 bp, synthetic construct
  source 1..18: mol_type = other DNA
gtgccggagatggaagac

SEQ ID NO: 4514 - DNA, 18 bp, synthetic construct
  source 1..18: mol_type = other DNA
ggtccggagatggaagac

SEQ ID NO: 4515 - DNA, 18 bp, synthetic construct
  source 1..18: mol_type = other DNA
gggtcggagatggaagac

SEQ ID NO: 4516 - DNA, 18 bp, synthetic construct
  source 1..18: mol_type = other DNA
gggctggagatggaagac

SEQ ID NO: 4517 - DNA, 18 bp, synthetic construct
  source 1..18: mol_type = other DNA
gggcctgagatggaagac

SEQ ID NO: 4518 - DNA, 18 bp, synthetic construct
  source 1..18: mol_type = other DNA
gggccgtagatggaagac

SEQ ID NO: 4519 - DNA, 18 bp, synthetic construct
  source 1..18: mol_type = other DNA
gggccggatatggaagac

SEQ ID NO: 4520 - DNA, 18 bp, synthetic construct
  source 1..18: mol_type = other DNA
gggccggagatggaaaac

SEQ ID NO: 4521 - DNA, 18 bp, synthetic construct
  source 1..18: mol_type = other DNA
tgggccggagatggaaga

SEQ ID NO: 4522 - DNA, 18 bp, synthetic construct
  source 1..18: mol_type = other DNA
gtggccggagatggaaga

SEQ ID NO: 4523 - DNA, 18 bp, synthetic construct
  source 1..18: mol_type = other DNA
ggtgccggagatggaaga

SEQ ID NO: 4524 - DNA, 18 bp, synthetic construct
  source 1..18: mol_type = other DNA
gggtccggagatggaaga

SEQ ID NO: 4525 - DNA, 18 bp, synthetic construct
  source 1..18: mol_type = other DNA
atgggccggagatggaag

SEQ ID NO: 4526 - DNA, 18 bp, synthetic construct
  source 1..18: mol_type = other DNA
agtggccggagatggaag

SEQ ID NO: 4527 - DNA, 18 bp, synthetic construct
  source 1..18: mol_type = other DNA; mol_type = other DNA
aggtgccggagatggaag

SEQ ID NO: 4528 - DNA, 18 bp, synthetic construct
  source 1..18: mol_type = other DNA
agggtccggagatggaag

SEQ ID NO: 4529 - DNA, 18 bp, synthetic construct
  source 1..18: mol_type = other DNA; mol_type = other DNA
gatgggccggagatggaa

SEQ ID NO: 4530 - DNA, 18 bp, synthetic construct
  source 1..18: mol_type = other DNA; mol_type = other DNA
gagtggccggagatggaa

SEQ ID NO: 4531 - DNA, 18 bp, synthetic construct
  source 1..18: mol_type = other DNA; mol_type = other DNA
gaggtgccggagatggaa

SEQ ID NO: 4532 - DNA, 18 bp, synthetic construct
  source 1..18: mol_type = other DNA; mol_type = other DNA
gagggtccggagatggaa

SEQ ID NO: 4533 - DNA, 18 bp, synthetic construct
  source 1..18: mol_type = other DNA; mol_type = other DNA
tgatgggccggagatgga

SEQ ID NO: 4534 - DNA, 18 bp, synthetic construct
  source 1..18: mol_type = other DNA; mol_type = other DNA
tgagtggccggagatgga

SEQ ID NO: 4535 - DNA, 18 bp, synthetic construct
  source 1..18: mol_type = other DNA; mol_type = other DNA
tgaggtgccggagatgga

SEQ ID NO: 4536 - DNA, 18 bp, synthetic construct
  source 1..18: mol_type = other DNA; mol_type = other DNA
tgagggtccggagatgga

SEQ ID NO: 4537 - DNA, 18 bp, synthetic construct
  source 1..18: mol_type = other DNA; mol_type = other DNA
gtgatgggccggagatgg

SEQ ID NO: 4538 - DNA, 18 bp, synthetic construct
  source 1..18: mol_type = other DNA; mol_type = other DNA
gtgagtggccggagatgg

SEQ ID NO: 4539 - DNA, 18 bp, synthetic construct
  source 1..18: mol_type = other DNA; mol_type = other DNA
gtgaggtgccggagatgg

SEQ ID NO: 4540 - DNA, 18 bp, synthetic construct
  source 1..18: mol_type = other DNA; mol_type = other DNA
gtgagggtccggagatgg

SEQ ID NO: 4541 - DNA, 18 bp, synthetic construct
  source 1..18: mol_type = other DNA; mol_type = other DNA
agtgatgggccggagatg

SEQ ID NO: 4542 - DNA, 18 bp, synthetic construct
  source 1..18: mol_type = other DNA; mol_type = other DNA
agtgagtggccggagatg

SEQ ID NO: 4543 - DNA, 18 bp, synthetic construct
  source 1..18: mol_type = other DNA; mol_type = other DNA
agtgaggtgccggagatg

SEQ ID NO: 4544 - DNA, 18 bp, synthetic construct
  source 1..18: mol_type = other DNA; mol_type = other DNA
agtgagggtccggagatg

SEQ ID NO: 4545 - DNA, 18 bp, synthetic construct
  source 1..18: mol_type = other DNA; mol_type = other DNA
cagtgagggtccggagat

SEQ ID NO: 4546 - DNA, 18 bp, synthetic construct
  source 1..18: mol_type = other DNA; mol_type = other DNA
cagtgatgggccggagat

SEQ ID NO: 4547 - DNA, 18 bp, synthetic construct
  source 1..18: mol_type = other DNA; mol_type = other DNA
cagtgagtggccggagat

SEQ ID NO: 4548 - DNA, 18 bp, synthetic construct
  source 1..18: mol_type = other DNA; mol_type = other DNA
cagtgaggtgccggagat

SEQ ID NO: 4549 - DNA, 18 bp, synthetic construct
  source 1..18: mol_type = other DNA; mol_type = other DNA
gcagtgaggtgccggaga

SEQ ID NO: 4550 - DNA, 18 bp, synthetic construct
  source 1..18: mol_type = other DNA; mol_type = other DNA
gcagtgagggtccggaga

SEQ ID NO: 4551 - DNA, 18 bp, synthetic construct
  source 1..18: mol_type = other DNA; mol_type = other DNA
gcagtgatgggccggaga

SEQ ID NO: 4552 - DNA, 18 bp, synthetic construct
  source 1..18: mol_type = other DNA; mol_type = other DNA
gcagtgagtggccggaga

SEQ ID NO: 4553 - DNA, 18 bp, synthetic construct
  source 1..18: mol_type = other DNA; mol_type = other DNA
ggcagtgagtggccggag

SEQ ID NO: 4554 - DNA, 18 bp, synthetic construct
  source 1..18: mol_type = other DNA; mol_type = other DNA
ggcagtgaggtgccggag

SEQ ID NO: 4555 - DNA, 18 bp, synthetic construct
  source 1..18: mol_type = other DNA; mol_type = other DNA
ggcagtgagggtccggag

SEQ ID NO: 4556 - DNA, 18 bp, synthetic construct
  source 1..18: mol_type = other DNA; mol_type = other DNA
ggcagtgatgggccggag

SEQ ID NO: 4557 - DNA, 18 bp, synthetic construct
  source 1..18: mol_type = other DNA; mol_type = other DNA
tggcagtgatgggccgga

SEQ ID NO: 4558 - DNA, 18 bp, synthetic construct
  source 1..18: mol_type = other DNA; mol_type = other DNA
tggcagtgagtggccgga

SEQ ID NO: 4559 - DNA, 18 bp, synthetic construct
  source 1..18: mol_type = other DNA; mol_type = other DNA
tggcagtgaggtgccgga

SEQ ID NO: 4560 - DNA, 18 bp, synthetic construct
  source 1..18: mol_type = other DNA; mol_type = other DNA
tggcagtgagggtccgga

SEQ ID NO: 4561 - DNA, 18 bp, synthetic construct
  source 1..18: mol_type = other DNA; mol_type = other DNA
gtggcagtgaagggccgg

SEQ ID NO: 4562 - DNA, 18 bp, synthetic construct
  source 1..18: mol_type = other DNA; mol_type = other DNA
gtggcagtgagaggccgg

SEQ ID NO: 4563 - DNA, 18 bp, synthetic construct
  source 1..18: mol_type = other DNA; mol_type = other DNA
gtggcagtgaggagccgg

SEQ ID NO: 4564 - DNA, 18 bp, synthetic construct
  source 1..18: mol_type = other DNA; mol_type = other DNA
gtggcagtgagggaccgg

SEQ ID NO: 4565 - DNA, 18 bp, synthetic construct
  source 1..18: mol_type = other DNA; mol_type = other DNA
agtggcagtgatgggccg

SEQ ID NO: 4566 - DNA, 18 bp, synthetic construct
  source 1..18: mol_type = other DNA; mol_type = other DNA
agtggcagtgagtggccg

SEQ ID NO: 4567 - DNA, 18 bp, synthetic construct
  source 1..18: mol_type = other DNA; mol_type = other DNA
agtggcagtgaggtgccg

SEQ ID NO: 4568 - DNA, 18 bp, synthetic construct
  source 1..18: mol_type = other DNA; mol_type = other DNA
agtggcagtgagggtccg

SEQ ID NO: 4569 - DNA, 18 bp, synthetic construct
  source 1..18: mol_type = other DNA; mol_type = other DNA
cagtggcagtgatgggcc

SEQ ID NO: 4570 - DNA, 18 bp, synthetic construct
  source 1..18: mol_type = other DNA; mol_type = other DNA
cagtggcagtgagtggcc

SEQ ID NO: 4571 - DNA, 18 bp, synthetic construct
  source 1..18: mol_type = other DNA; mol_type = other DNA
cagtggcagtgaggtgcc

SEQ ID NO: 4572 - DNA, 18 bp, synthetic construct
  source 1..18: mol_type = other DNA; mol_type = other DNA
cagtggcagtgagggtcc

SEQ ID NO: 4573 - DNA, 18 bp, synthetic construct
  source 1..18: mol_type = other DNA; mol_type = other DNA
cagtggcagtgagggacc

SEQ ID NO: 4574 - DNA, 18 bp, synthetic construct
  source 1..18: mol_type = other DNA; mol_type = other DNA
gcagtggcagtgatgggc

SEQ ID NO: 4575 - DNA, 18 bp, synthetic construct
  source 1..18: mol_type = other DNA; mol_type = other DNA
gcagtggcagtgagtggc

SEQ ID NO: 4576 - DNA, 18 bp, synthetic construct
  source 1..18: mol_type = other DNA; mol_type = other DNA
gcagtggcagtgaggtgc

SEQ ID NO: 4577 - DNA, 18 bp, synthetic construct
  source 1..18: mol_type = other DNA; mol_type = other DNA
gcagtggcagtgagggtc

SEQ ID NO: 4578 - DNA, 18 bp, synthetic construct
  source 1..18: mol_type = other DNA; mol_type = other DNA
gcagtggcagtgagggac

SEQ ID NO: 4579 - DNA, 18 bp, synthetic construct
  source 1..18: mol_type = other DNA; mol_type = other DNA
ggcagtggcagtgatggg

SEQ ID NO: 4580 - DNA, 18 bp, synthetic construct
  source 1..18: mol_type = other DNA; mol_type = other DNA
ggcagtggcagtgagtgg

SEQ ID NO: 4581 - DNA, 18 bp, synthetic construct
  source 1..18: mol_type = other DNA; mol_type = other DNA
ggcagtggcagtgaggtg

SEQ ID NO: 4582 - DNA, 18 bp, synthetic construct
  source 1..18: mol_type = other DNA; mol_type = other DNA
ggcagtggcagtgagggt

SEQ ID NO: 4583 - DNA, 18 bp, synthetic construct
  source 1..18: mol_type = other DNA; mol_type = other DNA
ggcagtggcagtgaggga

SEQ ID NO: 4584 - DNA, 25 bp, synthetic construct
  source 1..25: mol_type = other DNA; mol_type = other DNA
cagcaggtgctccagatgctgcaca

SEQ ID NO: 4585 - DNA, 25 bp, synthetic construct
  source 1..25: mol_type = other DNA; mol_type = other DNA
acagcaggtgctccagatgctgcac

SEQ ID NO: 4586 - DNA, 25 bp, synthetic construct
  source 1..25: mol_type = other DNA; mol_type = other DNA
acagcaggtgctccagatgctacac

SEQ ID NO: 4587 - DNA, 25 bp, synthetic construct
  source 1..25: mol_type = other DNA; mol_type = other DNA
aacagcaggtgctccagatgctgca

SEQ ID NO: 4588 - DNA, 25 bp, synthetic construct
  source 1..25: mol_type = other DNA; mol_type = other DNA
aacagcaggtgctccagatgctaca

SEQ ID NO: 4589 - DNA, 25 bp, synthetic construct
  source 1..25: mol_type = other DNA; mol_type = other DNA
gaacagcaggtgctccagatgctac

SEQ ID NO: 4590 - DNA, 25 bp, synthetic construct
  source 1..25: mol_type = other DNA; mol_type = other DNA
agaacagcaggtgctccagatgctg

SEQ ID NO: 4591 - DNA, 25 bp, synthetic construct
  source 1..25: mol_type = other DNA; mol_type = other DNA
agaacagcaggtgctccagatgcta

SEQ ID NO: 4592 - DNA, 25 bp, synthetic construct
  source 1..25: mol_type = other DNA; mol_type = other DNA
tagaacagcaggtgctccagatgct

SEQ ID NO: 4593 - DNA, 25 bp, synthetic construct
  source 1..25: mol_type = other DNA; mol_type = other DNA
tagaacagcaggtgctccagatact

SEQ ID NO: 4594 - DNA, 25 bp, synthetic construct
  source 1..25: mol_type = other DNA; mol_type = other DNA
atagaacagcaggtgctccagatac

SEQ ID NO: 4595 - DNA, 25 bp, synthetic construct
  source 1..25: mol_type = other DNA; mol_type = other DNA
catagaacagcaggtgctccagatg

SEQ ID NO: 4596 - DNA, 25 bp, synthetic construct
  source 1..25: mol_type = other DNA; mol_type = other DNA
catagaacagcaggtgctccagata

SEQ ID NO: 4597 - DNA, 25 bp, synthetic construct
  source 1..25: mol_type = other DNA; mol_type = other DNA
ccatagaacagcaggtgctccagat

SEQ ID NO: 4598 - DNA, 25 bp, synthetic construct
  source 1..25: mol_type = other DNA; mol_type = other DNA
ccatagaacagcaggtgctccaaat

SEQ ID NO: 4599 - DNA, 25 bp, synthetic construct
  source 1..25: mol_type = other DNA; mol_type = other DNA
cccatagaacagcaggtgctccaaa

SEQ ID NO: 4600 - DNA, 25 bp, synthetic construct
  source 1..25: mol_type = other DNA; mol_type = other DNA
ccccatagaacagcaggtgctccag

SEQ ID NO: 4601 - DNA, 25 bp, synthetic construct
  source 1..25: mol_type = other DNA; mol_type = other DNA
ccccatagaacagcaggtgctccaa

SEQ ID NO: 4602 - DNA, 25 bp, synthetic construct
  source 1..25: mol_type = other DNA; mol_type = other DNA
gccccatagaacagcaggtgctcca

SEQ ID NO: 4603 - DNA, 25 bp, synthetic construct
  source 1..25: mol_type = other DNA; mol_type = other DNA
gccccatagaacagcaggtactcca

SEQ ID NO: 4604 - DNA, 25 bp, synthetic construct
  source 1..25: mol_type = other DNA; mol_type = other DNA
tgccccatagaacagcaggtactcc

SEQ ID NO: 4605 - DNA, 25 bp, synthetic construct
  source 1..25: mol_type = other DNA; mol_type = other DNA
ctgccccatagaacagcaggtgctc

SEQ ID NO: 4606 - DNA, 25 bp, synthetic construct
  source 1..25: mol_type = other DNA; mol_type = other DNA
ctgccccatagaacagcaggtactc

SEQ ID NO: 4607 - DNA, 25 bp, synthetic construct
  source 1..25: mol_type = other DNA; mol_type = other DNA
tctgccccatagaacagcaggtgct

SEQ ID NO: 4608 - DNA, 25 bp, synthetic construct
  source 1..25: mol_type = other DNA; mol_type = other DNA
tctgccccatagaacagcaggtact

SEQ ID NO: 4609 - DNA, 25 bp, synthetic construct
  source 1..25: mol_type = other DNA; mol_type = other DNA
gtctgccccatagaacagcaggtac

SEQ ID NO: 4610 - DNA, 25 bp, synthetic construct
  source 1..25: mol_type = other DNA; mol_type = other DNA
tgtctgccccatagaacagcaggtg

SEQ ID NO: 4611 - DNA, 25 bp, synthetic construct
  source 1..25: mol_type = other DNA; mol_type = other DNA
tgtctgccccatagaacagcaggta

SEQ ID NO: 4612 - DNA, 25 bp, synthetic construct
  source 1..25: mol_type = other DNA; mol_type = other DNA
atgtctgccccatagaacagcaggt

SEQ ID NO: 4613 - DNA, 25 bp, synthetic construct
  source 1..25: mol_type = other DNA; mol_type = other DNA
atgtctgccccatagaacagcagat

SEQ ID NO: 4614 - DNA, 25 bp, synthetic construct
  source 1..25: mol_type = other DNA; mol_type = other DNA
catgtctgccccatagaacagcaga

SEQ ID NO: 4615 - DNA, 25 bp, synthetic construct
  source 1..25: mol_type = other DNA; mol_type = other DNA
ccatgtctgccccatagaacagcag

SEQ ID NO: 4616 - DNA, 25 bp, synthetic construct
  source 1..25: mol_type = other DNA; mol_type = other DNA
ccatgtctgccccatagaacagcaa

SEQ ID NO: 4617 - DNA, 25 bp, synthetic construct
  source 1..25: mol_type = other DNA; mol_type = other DNA
cccatgtctgccccatagaacagca

SEQ ID NO: 4618 - DNA, 25 bp, synthetic construct
  source 1..25: mol_type = other DNA; mol_type = other DNA
cccatgtctgccccatagaacaaca

SEQ ID NO: 4619 - DNA, 25 bp, synthetic construct
  source 1..25: mol_type = other DNA; mol_type = other DNA
ccccatgtctgccccatagaacaac

SEQ ID NO: 4620 - DNA, 25 bp, synthetic construct
  source 1..25: mol_type = other DNA; mol_type = other DNA
cccccatgtctgccccatagaacag

SEQ ID NO: 4621 - DNA, 25 bp, synthetic construct
  source 1..25: mol_type = other DNA; mol_type = other DNA
cccccatgtctgccccatagaacaa

SEQ ID NO: 4622 - DNA, 25 bp, synthetic construct
  source 1..25: mol_type = other DNA; mol_type = other DNA
gcccccatgtctgccccatagaaca

SEQ ID NO: 4623 - DNA, 25 bp, synthetic construct
  source 1..25: mol_type = other DNA; mol_type = other DNA
gcccccatgtctgccccataaaaca

SEQ ID NO: 4624 - DNA, 25 bp, synthetic construct
  source 1..25: mol_type = other DNA; mol_type = other DNA
ggcccccatgtctgccccataaaac

SEQ ID NO: 4625 - DNA, 25 bp, synthetic construct
  source 1..25: mol_type = other DNA; mol_type = other DNA
gggcccccatgtctgccccatagaa

SEQ ID NO: 4626 - DNA, 25 bp, synthetic construct
  source 1..25: mol_type = other DNA; mol_type = other DNA
gggcccccatgtctgccccataaaa

SEQ ID NO: 4627 - DNA, 25 bp, synthetic construct
  source 1..25: mol_type = other DNA; mol_type = other DNA
tgggcccccatgtctgccccataga

SEQ ID NO: 4628 - DNA, 25 bp, synthetic construct
  source 1..25: mol_type = other DNA; mol_type = other DNA
tgggcccccatgtctgccccataaa

SEQ ID NO: 4629 - DNA, 25 bp, synthetic construct
  source 1..25: mol_type = other DNA; mol_type = other DNA
ctgggcccccatgtctgccccataa

SEQ ID NO: 4630 - DNA, 25 bp, synthetic construct
  source 1..25: mol_type = other DNA; mol_type = other DNA
tctgggcccccatgtctgccccata

SEQ ID NO: 4631 - DNA, 25 bp, synthetic construct
  source 1..25: mol_type = other DNA; mol_type = other DNA
tctgggcccccatgtctaccccata

SEQ ID NO: 4632 - DNA, 25 bp, synthetic construct
  source 1..25: mol_type = other DNA; mol_type = other DNA
ttctgggcccccatgtctgccccat

SEQ ID NO: 4633 - DNA, 25 bp, synthetic construct
  source 1..25: mol_type = other DNA; mol_type = other DNA
ttctgggcccccatgtctaccccat

SEQ ID NO: 4634 - DNA, 25 bp, synthetic construct
  source 1..25: mol_type = other DNA; mol_type = other DNA
gttctgggcccccatgtctacccca

SEQ ID NO: 4635 - DNA, 25 bp, synthetic construct
  source 1..25: mol_type = other DNA; mol_type = other DNA
cgttctgggcccccatgtctgcccc

SEQ ID NO: 4636 - DNA, 25 bp, synthetic construct
  source 1..25: mol_type = other DNA; mol_type = other DNA
cgttctgggcccccatgtctacccc

SEQ ID NO: 4637 - DNA, 25 bp, synthetic construct
  source 1..25: mol_type = other DNA; mol_type = other DNA
gcgttctgggcccccatgtctgccc

SEQ ID NO: 4638 - DNA, 25 bp, synthetic construct
  source 1..25: mol_type = other DNA; mol_type = other DNA
gcgttctgggcccccatgtctaccc

SEQ ID NO: 4639 - DNA, 25 bp, synthetic construct
  source 1..25: mol_type = other DNA; mol_type = other DNA
ggcgttctgggcccccatgtctacc

SEQ ID NO: 4640 - DNA, 25 bp, synthetic construct
  source 1..25: mol_type = other DNA; mol_type = other DNA
aggcgttctgggcccccatgtctgc

SEQ ID NO: 4641 - DNA, 25 bp, synthetic construct
  source 1..25: mol_type = other DNA; mol_type = other DNA
aggcgttctgggcccccatgtctac

SEQ ID NO: 4642 - DNA, 25 bp, synthetic construct
  source 1..25: mol_type = other DNA; mol_type = other DNA
gaggcgttctgggcccccatgtctg

SEQ ID NO: 4643 - DNA, 25 bp, synthetic construct
  source 1..25: mol_type = other DNA; mol_type = other DNA
gaggcgttctgggcccccatgtcta

SEQ ID NO: 4644 - DNA, 25 bp, synthetic construct
  source 1..25: mol_type = other DNA; mol_type = other DNA
cgaggcgttctgggcccccatatct

SEQ ID NO: 4645 - DNA, 25 bp, synthetic construct
  source 1..25: mol_type = other DNA; mol_type = other DNA
ccgaggcgttctgggcccccatgtc

SEQ ID NO: 4646 - DNA, 25 bp, synthetic construct
  source 1..25: mol_type = other DNA; mol_type = other DNA
ccgaggcgttctgggcccccatatc

SEQ ID NO: 4647 - DNA, 25 bp, synthetic construct
  source 1..25: mol_type = other DNA; mol_type = other DNA
cccgaggcgttctgggcccccatgt

SEQ ID NO: 4648 - DNA, 25 bp, synthetic construct
  source 1..25: mol_type = other DNA; mol_type = other DNA
cccgaggcgttctgggcccccatat

SEQ ID NO: 4649 - DNA, 25 bp, synthetic construct
  source 1..25: mol_type = other DNA; mol_type = other DNA
ccccgaggcgttctgggcccccata

SEQ ID NO: 4650 - DNA, 25 bp, synthetic construct
  source 1..25: mol_type = other DNA; mol_type = other DNA
tccccgaggcgttctgggcccccat

SEQ ID NO: 4651 - DNA, 25 bp, synthetic construct
  source 1..25: mol_type = other DNA; mol_type = other DNA
tccccgaggcgttctggacccccat

SEQ ID NO: 4652 - DNA, 25 bp, synthetic construct
  source 1..25: mol_type = other DNA; mol_type = other DNA
ttccccgaggcgttctgggccccca

SEQ ID NO: 4653 - DNA, 25 bp, synthetic construct
  source 1..25: mol_type = other DNA; mol_type = other DNA
ttccccgaggcgttctggaccccca

SEQ ID NO: 4654 - DNA, 25 bp, synthetic construct
  source 1..25: mol_type = other DNA; mol_type = other DNA
gttccccgaggcgttctggaccccc

SEQ ID NO: 4655 - DNA, 25 bp, synthetic construct
  source 1..25: mol_type = other DNA; mol_type = other DNA
tgttccccgaggcgttctgggcccc

SEQ ID NO: 4656 - DNA, 25 bp, synthetic construct
  source 1..25: mol_type = other DNA; mol_type = other DNA
tgttccccgaggcgttctggacccc

SEQ ID NO: 4657 - DNA, 25 bp, synthetic construct
  source 1..25: mol_type = other DNA; mol_type = other DNA
gtgttccccgaggcgttctgggccc

SEQ ID NO: 4658 - DNA, 25 bp, synthetic construct
  source 1..25: mol_type = other DNA; mol_type = other DNA
gtgttccccgaggcgttctggaccc

SEQ ID NO: 4659 - DNA, 25 bp, synthetic construct
  source 1..25: mol_type = other DNA; mol_type = other DNA
tgtgttccccgaggcgttctggacc

SEQ ID NO: 4660 - DNA, 25 bp, synthetic construct
  source 1..25: mol_type = other DNA; mol_type = other DNA
ctgtgttccccgaggcgttctgggc

SEQ ID NO: 4661 - DNA, 25 bp, synthetic construct
  source 1..25: mol_type = other DNA; mol_type = other DNA
ctgtgttccccgaggcgttctggac

SEQ ID NO: 4662 - DNA, 25 bp, synthetic construct
  source 1..25: mol_type = other DNA; mol_type = other DNA
gctgtgttccccgaggcgttctggg

SEQ ID NO: 4663 - DNA, 25 bp, synthetic construct
  source 1..25: mol_type = other DNA; mol_type = other DNA
gctgtgttccccgaggcgttctgga

SEQ ID NO: 4664 - DNA, 25 bp, synthetic construct
  source 1..25: mol_type = other DNA; mol_type = other DNA
ggctgtgttccccgaggcgttctga

SEQ ID NO: 4665 - DNA, 25 bp, synthetic construct
  source 1..25: mol_type = other DNA; mol_type = other DNA
gggctgtgttccccgaggcgttctg

SEQ ID NO: 4666 - DNA, 25 bp, synthetic construct
  source 1..25: mol_type = other DNA; mol_type = other DNA
gggctgtgttccccgaggcgttcta

SEQ ID NO: 4667 - DNA, 25 bp, synthetic construct
  source 1..25: mol_type = other DNA; mol_type = other DNA
agggctgtgttccccgaggcgttct

SEQ ID NO: 4668 - DNA, 25 bp, synthetic construct
  source 1..25: mol_type = other DNA; mol_type = other DNA
agggctgtgttccccgaggcattct

SEQ ID NO: 4669 - DNA, 25 bp, synthetic construct
  source 1..25: mol_type = other DNA; mol_type = other DNA
cagggctgtgttccccgaggcattc

SEQ ID NO: 4670 - DNA, 25 bp, synthetic construct
  source 1..25: mol_type = other DNA; mol_type = other DNA
gcagggctgtgttccccgaggcgtt

SEQ ID NO: 4671 - DNA, 25 bp, synthetic construct
  source 1..25: mol_type = other DNA; mol_type = other DNA
gcagggctgtgttccccgaggcatt

SEQ ID NO: 4672 - DNA, 25 bp, synthetic construct
  source 1..25: mol_type = other DNA; mol_type = other DNA
tgcagggctgtgttccccgaggcgt

SEQ ID NO: 4673 - DNA, 25 bp, synthetic construct
  source 1..25: mol_type = other DNA; mol_type = other DNA
tgcagggctgtgttccccgaggcat

SEQ ID NO: 4674 - DNA, 25 bp, synthetic construct
  source 1..25: mol_type = other DNA; mol_type = other DNA
gtgcagggctgtgttccccgaggca

SEQ ID NO: 4675 - DNA, 25 bp, synthetic construct
  source 1..25: mol_type = other DNA; mol_type = other DNA
tgtgcagggctgtgttccccgaggc

SEQ ID NO: 4676 - DNA, 25 bp, synthetic construct
  source 1..25: mol_type = other DNA; mol_type = other DNA
tgtgcagggctgtgttccccgagac

SEQ ID NO: 4677 - DNA, 25 bp, synthetic construct
  source 1..25: mol_type = other DNA; mol_type = other DNA
atgtgcagggctgtgttccccgagg

SEQ ID NO: 4678 - DNA, 25 bp, synthetic construct
  source 1..25: mol_type = other DNA; mol_type = other DNA
atgtgcagggctgtgttccccgaga

SEQ ID NO: 4679 - DNA, 25 bp, synthetic construct
  source 1..25: mol_type = other DNA; mol_type = other DNA
gatgtgcagggctgtgttccccgaa

SEQ ID NO: 4680 - DNA, 25 bp, synthetic construct
  source 1..25: mol_type = other DNA; mol_type = other DNA
agatgtgcagggctgtgttccccga

SEQ ID NO: 4681 - DNA, 25 bp, synthetic construct
  source 1..25: mol_type = other DNA; mol_type = other DNA
agatgtgcagggctgtgttccccaa

SEQ ID NO: 4682 - DNA, 25 bp, synthetic construct
  source 1..25: mol_type = other DNA; mol_type = other DNA
cagatgtgcagggctgtgttccccg

SEQ ID NO: 4683 - DNA, 25 bp, synthetic construct
  source 1..25: mol_type = other DNA; mol_type = other DNA
cagatgtgcagggctgtgttcccca

SEQ ID NO: 4684 - DNA, 25 bp, synthetic construct
  source 1..25: mol_type = other DNA; mol_type = other DNA
acagatgtgcagggctgtattcccc

SEQ ID NO: 4685 - DNA, 25 bp, synthetic construct
  source 1..25: mol_type = other DNA; mol_type = other DNA
cacagatgtgcagggctgtgttccc

SEQ ID NO: 4686 - DNA, 25 bp, synthetic construct
  source 1..25: mol_type = other DNA; mol_type = other DNA
cacagatgtgcagggctgtattccc

SEQ ID NO: 4687 - DNA, 25 bp, synthetic construct
  source 1..25: mol_type = other DNA; mol_type = other DNA
gcacagatgtgcagggctgtgttcc

SEQ ID NO: 4688 - DNA, 25 bp, synthetic construct
  source 1..25: mol_type = other DNA; mol_type = other DNA
gcacagatgtgcagggctgtattcc

SEQ ID NO: 4689 - DNA, 25 bp, synthetic construct
  source 1..25: mol_type = other DNA; mol_type = other DNA
ggcacagatgtgcagggctgtattc

SEQ ID NO: 4690 - DNA, 25 bp, synthetic construct
  source 1..25: mol_type = other DNA; mol_type = other DNA
gggcacagatgtgcagggctgtgtt

SEQ ID NO: 4691 - DNA, 25 bp, synthetic construct
  source 1..25: mol_type = other DNA; mol_type = other DNA
gggcacagatgtgcagggctgtatt

SEQ ID NO: 4692 - DNA, 25 bp, synthetic construct
  source 1..25: mol_type = other DNA; mol_type = other DNA
agggcacagatgtgcagggctgtgt

SEQ ID NO: 4693 - DNA, 25 bp, synthetic construct
  source 1..25: mol_type = other DNA; mol_type = other DNA
agggcacagatgtgcagggctgtat

SEQ ID NO: 4694 - DNA, 25 bp, synthetic construct
  source 1..25: mol_type = other DNA; mol_type = other DNA
gagggcacagatgtgcagggctgta

SEQ ID NO: 4695 - DNA, 25 bp, synthetic construct
  source 1..25: mol_type = other DNA; mol_type = other DNA
agagggcacagatgtgcagggctgt

SEQ ID NO: 4696 - DNA, 25 bp, synthetic construct
  source 1..25: mol_type = other DNA; mol_type = other DNA
agagggcacagatgtgcagggctat

SEQ ID NO: 4697 - DNA, 25 bp, synthetic construct
  source 1..25: mol_type = other DNA; mol_type = other DNA
tagagggcacagatgtgcagggctg

SEQ ID NO: 4698 - DNA, 25 bp, synthetic construct
  source 1..25: mol_type = other DNA; mol_type = other DNA
tagagggcacagatgtgcagggcta

SEQ ID NO: 4699 - DNA, 25 bp, synthetic construct
  source 1..25: mol_type = other DNA; mol_type = other DNA
gtagagggcacagatgtgcaggact

SEQ ID NO: 4700 - DNA, 25 bp, synthetic construct
  source 1..25: mol_type = other DNA; mol_type = other DNA
tgtagagggcacagatgtgcagggc

SEQ ID NO: 4701 - DNA, 25 bp, synthetic construct
  source 1..25: mol_type = other DNA; mol_type = other DNA
tgtagagggcacagatgtgcaggac

SEQ ID NO: 4702 - DNA, 25 bp, synthetic construct
  source 1..25: mol_type = other DNA; mol_type = other DNA
ttgtagagggcacagatgtgcaggg

SEQ ID NO: 4703 - DNA, 25 bp, synthetic construct
  source 1..25: mol_type = other DNA; mol_type = other DNA
ttgtagagggcacagatgtgcagga

SEQ ID NO: 4704 - DNA, 25 bp, synthetic construct
  source 1..25: mol_type = other DNA; mol_type = other DNA
gttgtagagggcacagatgtgcaga

SEQ ID NO: 4705 - DNA, 25 bp, synthetic construct
  source 1..25: mol_type = other DNA; mol_type = other DNA
ggttgtagagggcacagatgtgcag

SEQ ID NO: 4706 - DNA, 25 bp, synthetic construct
  source 1..25: mol_type = other DNA; mol_type = other DNA
ggttgtagagggcacagatgtgcaa

SEQ ID NO: 4707 - DNA, 25 bp, synthetic construct
  source 1..25: mol_type = other DNA; mol_type = other DNA
tggttgtagagggcacagatgtgca

SEQ ID NO: 4708 - DNA, 25 bp, synthetic construct
  source 1..25: mol_type = other DNA; mol_type = other DNA
tggttgtagagggcacagatgtaca

SEQ ID NO: 4709 - DNA, 25 bp, synthetic construct
  source 1..25: mol_type = other DNA; mol_type = other DNA
ctggttgtagagggcacagatgtac

SEQ ID NO: 4710 - DNA, 25 bp, synthetic construct
  source 1..25: mol_type = other DNA; mol_type = other DNA
cctggttgtagagggcacagatgtg

SEQ ID NO: 4711 - DNA, 25 bp, synthetic construct
  source 1..25: mol_type = other DNA; mol_type = other DNA
cctggttgtagagggcacagatgta

SEQ ID NO: 4712 - DNA, 25 bp, synthetic construct
  source 1..25: mol_type = other DNA; mol_type = other DNA
acctggttgtagagggcacagatgt

SEQ ID NO: 4713 - DNA, 25 bp, synthetic construct
  source 1..25: mol_type = other DNA; mol_type = other DNA
acctggttgtagagggcacagatat

SEQ ID NO: 4714 - DNA, 25 bp, synthetic construct
  source 1..25: mol_type = other DNA; mol_type = other DNA
cacctggttgtagagggcacagata

SEQ ID NO: 4715 - DNA, 25 bp, synthetic construct
  source 1..25: mol_type = other DNA; mol_type = other DNA
gcacctggttgtagagggcacagat

SEQ ID NO: 4716 - DNA, 25 bp, synthetic construct
  source 1..25: mol_type = other DNA; mol_type = other DNA
gcacctggttgtagagggcacaaat

SEQ ID NO: 4717 - DNA, 25 bp, synthetic construct
  source 1..25: mol_type = other DNA; mol_type = other DNA
cgcacctggttgtagagggcacaga

SEQ ID NO: 4718 - DNA, 25 bp, synthetic construct
  source 1..25: mol_type = other DNA; mol_type = other DNA
cgcacctggttgtagagggcacaaa

SEQ ID NO: 4719 - DNA, 25 bp, synthetic construct
  source 1..25: mol_type = other DNA; mol_type = other DNA
tcgcacctggttgtagagggcacaa

SEQ ID NO: 4720 - DNA, 25 bp, synthetic construct
  source 1..25: mol_type = other DNA; mol_type = other DNA
gtcgcacctggttgtagagggcaca

SEQ ID NO: 4721 - DNA, 25 bp, synthetic construct
  source 1..25: mol_type = other DNA; mol_type = other DNA
gtcgcacctggttgtagaggacaca

SEQ ID NO: 4722 - DNA, 25 bp, synthetic construct
  source 1..25: mol_type = other DNA; mol_type = other DNA
agtcgcacctggttgtagagggcac

SEQ ID NO: 4723 - DNA, 25 bp, synthetic construct
  source 1..25: mol_type = other DNA; mol_type = other DNA
agtcgcacctggttgtagaggacac

SEQ ID NO: 4724 - DNA, 25 bp, synthetic construct
  source 1..25: mol_type = other DNA; mol_type = other DNA
cagtcgcacctggttgtagaggaca

SEQ ID NO: 4725 - DNA, 25 bp, synthetic construct
  source 1..25: mol_type = other DNA; mol_type = other DNA
acagtcgcacctggttgtagagggc

SEQ ID NO: 4726 - DNA, 25 bp, synthetic construct
  source 1..25: mol_type = other DNA; mol_type = other DNA
acagtcgcacctggttgtagaggac

SEQ ID NO: 4727 - DNA, 25 bp, synthetic construct
  source 1..25: mol_type = other DNA; mol_type = other DNA
cacagtcgcacctggttgtagaggg

SEQ ID NO: 4728 - DNA, 25 bp, synthetic construct
  source 1..25: mol_type = other DNA; mol_type = other DNA
cacagtcgcacctggttgtagagga

SEQ ID NO: 4729 - DNA, 25 bp, synthetic construct
  source 1..25: mol_type = other DNA; mol_type = other DNA
acacagtcgcacctggttgtagaga

SEQ ID NO: 4730 - DNA, 25 bp, synthetic construct
  source 1..25: mol_type = other DNA; mol_type = other DNA
cacacagtcgcacctggttgtagag

SEQ ID NO: 4731 - DNA, 25 bp, synthetic construct
  source 1..25: mol_type = other DNA; mol_type = other DNA
cacacagtcgcacctggttgtagaa

SEQ ID NO: 4732 - DNA, 25 bp, synthetic construct
  source 1..25: mol_type = other DNA; mol_type = other DNA
acacacagtcgcacctggttgtaga

SEQ ID NO: 4733 - DNA, 25 bp, synthetic construct
  source 1..25: mol_type = other DNA; mol_type = other DNA
acacacagtcgcacctggttgtaaa

SEQ ID NO: 4734 - DNA, 25 bp, synthetic construct
  source 1..25: mol_type = other DNA; mol_type = other DNA
gacacacagtcgcacctggttgtaa

SEQ ID NO: 4735 - DNA, 25 bp, synthetic construct
  source 1..25: mol_type = other DNA; mol_type = other DNA
ggacacacagtcgcacctggttgta

SEQ ID NO: 4736 - DNA, 25 bp, synthetic construct
  source 1..25: mol_type = other DNA; mol_type = other DNA
ggacacacagtcgcacctggttata

SEQ ID NO: 4737 - DNA, 25 bp, synthetic construct
  source 1..25: mol_type = other DNA; mol_type = other DNA
aggacacacagtcgcacctggttgt

SEQ ID NO: 4738 - DNA, 25 bp, synthetic construct
  source 1..25: mol_type = other DNA; mol_type = other DNA
aggacacacagtcgcacctggttat

SEQ ID NO: 4739 - DNA, 25 bp, synthetic construct
  source 1..25: mol_type = other DNA; mol_type = other DNA
caggacacacagtcgcacctggtta

SEQ ID NO: 4740 - DNA, 25 bp, synthetic construct
  source 1..25: mol_type = other DNA; mol_type = other DNA
gcaggacacacagtcgcacctggtt

SEQ ID NO: 4741 - DNA, 25 bp, synthetic construct
  source 1..25: mol_type = other DNA; mol_type = other DNA
gcaggacacacagtcgcacctgatt

SEQ ID NO: 4742 - DNA, 25 bp, synthetic construct
  source 1..25: mol_type = other DNA; mol_type = other DNA
tgcaggacacacagtcgcacctggt

SEQ ID NO: 4743 - DNA, 25 bp, synthetic construct
  source 1..25: mol_type = other DNA; mol_type = other DNA
tgcaggacacacagtcgcacctgat

SEQ ID NO: 4744 - DNA, 25 bp, synthetic construct
  source 1..25: mol_type = other DNA; mol_type = other DNA
gtgcaggacacacagtcgcacctga

SEQ ID NO: 4745 - DNA, 25 bp, synthetic construct
  source 1..25: mol_type = other DNA; mol_type = other DNA
tgtgcaggacacacagtcgcacctg

SEQ ID NO: 4746 - DNA, 25 bp, synthetic construct
  source 1..25: mol_type = other DNA; mol_type = other DNA
tgtgcaggacacacagtcgcaccta

SEQ ID NO: 4747 - DNA, 25 bp, synthetic construct
  source 1..25: mol_type = other DNA; mol_type = other DNA
atgtgcaggacacacagtcgcacct

SEQ ID NO: 4748 - DNA, 25 bp, synthetic construct
  source 1..25: mol_type = other DNA; mol_type = other DNA
atgtgcaggacacacagtcacacct

SEQ ID NO: 4749 - DNA, 25 bp, synthetic construct
  source 1..25: mol_type = other DNA; mol_type = other DNA
catgtgcaggacacacagtcacacc

SEQ ID NO: 4750 - DNA, 25 bp, synthetic construct
  source 1..25: mol_type = other DNA; mol_type = other DNA
gcatgtgcaggacacacagtcgcac

SEQ ID NO: 4751 - DNA, 25 bp, synthetic construct
  source 1..25: mol_type = other DNA; mol_type = other DNA
gcatgtgcaggacacacagtcacac

SEQ ID NO: 4752 - DNA, 25 bp, synthetic construct
  source 1..25: mol_type = other DNA; mol_type = other DNA
ggcatgtgcaggacacacagtcgca

SEQ ID NO: 4753 - DNA, 25 bp, synthetic construct
  source 1..25: mol_type = other DNA; mol_type = other DNA
ggcatgtgcaggacacacagtcaca

SEQ ID NO: 4754 - DNA, 25 bp, synthetic construct
  source 1..25: mol_type = other DNA; mol_type = other DNA
aggcatgtgcaggacacacagtcac

SEQ ID NO: 4755 - DNA, 25 bp, synthetic construct
  source 1..25: mol_type = other DNA; mol_type = other DNA
caggcatgtgcaggacacacagtcg

SEQ ID NO: 4756 - DNA, 25 bp, synthetic construct
  source 1..25: mol_type = other DNA; mol_type = other DNA
caggcatgtgcaggacacacagtca

SEQ ID NO: 4757 - DNA, 25 bp, synthetic construct
  source 1..25: mol_type = other DNA; mol_type = other DNA
gcaggcatgtgcaggacacacagtc

SEQ ID NO: 4758 - DNA, 25 bp, synthetic construct
  source 1..25: mol_type = other DNA; mol_type = other DNA
gcaggcatgtgcaggacacacaatc

SEQ ID NO: 4759 - DNA, 25 bp, synthetic construct
  source 1..25: mol_type = other DNA; mol_type = other DNA
tgcaggcatgtgcaggacacacaat

SEQ ID NO: 4760 - DNA, 25 bp, synthetic construct
  source 1..25: mol_type = other DNA; mol_type = other DNA
gtgcaggcatgtgcaggacacacag

SEQ ID NO: 4761 - DNA, 25 bp, synthetic construct
  source 1..25: mol_type = other DNA; mol_type = other DNA
gtgcaggcatgtgcaggacacacaa

SEQ ID NO: 4762 - DNA, 25 bp, synthetic construct
  source 1..25: mol_type = other DNA; mol_type = other DNA
ggtgcaggcatgtgcaggacacaca

SEQ ID NO: 4763 - DNA, 25 bp, synthetic construct
  source 1..25: mol_type = other DNA; mol_type = other DNA
ggtgcaggcatgtgcagaacacaca

SEQ ID NO: 4764 - DNA, 25 bp, synthetic construct
  source 1..25: mol_type = other DNA; mol_type = other DNA
tggtgcaggcatgtgcagaacacac

SEQ ID NO: 4765 - DNA, 25 bp, synthetic construct
  source 1..25: mol_type = other DNA; mol_type = other DNA
ctggtgcaggcatgtgcaggacaca

SEQ ID NO: 4766 - DNA, 25 bp, synthetic construct
  source 1..25: mol_type = other DNA; mol_type = other DNA
ctggtgcaggcatgtgcagaacaca

SEQ ID NO: 4767 - DNA, 25 bp, synthetic construct
  source 1..25: mol_type = other DNA; mol_type = other DNA
gctggtgcaggcatgtgcaggacac

SEQ ID NO: 4768 - DNA, 25 bp, synthetic construct
  source 1..25: mol_type = other DNA; mol_type = other DNA
gctggtgcaggcatgtgcagaacac

SEQ ID NO: 4769 - DNA, 25 bp, synthetic construct
  source 1..25: mol_type = other DNA; mol_type = other DNA
cgctggtgcaggcatgtgcagaaca

SEQ ID NO: 4770 - DNA, 25 bp, synthetic construct
  source 1..25: mol_type = other DNA; mol_type = other DNA
tcgctggtgcaggcatgtgcaggac

SEQ ID NO: 4771 - DNA, 25 bp, synthetic construct
  source 1..25: mol_type = other DNA; mol_type = other DNA
tcgctggtgcaggcatgtgcagaac

SEQ ID NO: 4772 - DNA, 25 bp, synthetic construct
  source 1..25: mol_type = other DNA; mol_type = other DNA
ctcgctggtgcaggcatgtgcagga

SEQ ID NO: 4773 - DNA, 25 bp, synthetic construct
  source 1..25: mol_type = other DNA; mol_type = other DNA
ctcgctggtgcaggcatgtgcagaa

SEQ ID NO: 4774 - DNA, 25 bp, synthetic construct
  source 1..25: mol_type = other DNA; mol_type = other DNA
actcgctggtgcaggcatgtgcaga

SEQ ID NO: 4775 - DNA, 25 bp, synthetic construct
  source 1..25: mol_type = other DNA; mol_type = other DNA
cactcgctggtgcaggcatgtgcag

SEQ ID NO: 4776 - DNA, 25 bp, synthetic construct
  source 1..25: mol_type = other DNA; mol_type = other DNA
cactcgctggtgcaggcatgtgcaa

SEQ ID NO: 4777 - DNA, 25 bp, synthetic construct
  source 1..25: mol_type = other DNA; mol_type = other DNA
acactcgctggtgcaggcatgtgca

SEQ ID NO: 4778 - DNA, 25 bp, synthetic construct
  source 1..25: mol_type = other DNA; mol_type = other DNA
acactcgctggtgcaggcatgtaca

SEQ ID NO: 4779 - DNA, 25 bp, synthetic construct
  source 1..25: mol_type = other DNA; mol_type = other DNA
cacactcgctggtgcaggcatgtac

SEQ ID NO: 4780 - DNA, 25 bp, synthetic construct
  source 1..25: mol_type = other DNA; mol_type = other DNA
gcacactcgctggtgcaggcatgtg

SEQ ID NO: 4781 - DNA, 25 bp, synthetic construct
  source 1..25: mol_type = other DNA; mol_type = other DNA
gcacactcgctggtgcaggcatgta

SEQ ID NO: 4782 - DNA, 25 bp, synthetic construct
  source 1..25: mol_type = other DNA; mol_type = other DNA
tgcacactcgctggtgcaggcatgt

SEQ ID NO: 4783 - DNA, 25 bp, synthetic construct
  source 1..25: mol_type = other DNA; mol_type = other DNA
tgcacactcgctggtgcaggcatat

SEQ ID NO: 4784 - DNA, 25 bp, synthetic construct
  source 1..25: mol_type = other DNA; mol_type = other DNA
atgcacactcgctggtgcaggcata

SEQ ID NO: 4785 - DNA, 25 bp, synthetic construct
  source 1..25: mol_type = other DNA; mol_type = other DNA
tatgcacactcgctggtgcaggcat

SEQ ID NO: 4786 - DNA, 25 bp, synthetic construct
  source 1..25: mol_type = other DNA; mol_type = other DNA
tatgcacactcgctggtgcagacat

SEQ ID NO: 4787 - DNA, 25 bp, synthetic construct
  source 1..25: mol_type = other DNA; mol_type = other DNA
atatgcacactcgctggtgcaggca

SEQ ID NO: 4788 - DNA, 25 bp, synthetic construct
  source 1..25: mol_type = other DNA; mol_type = other DNA
atatgcacactcgctggtgcagaca

SEQ ID NO: 4789 - DNA, 25 bp, synthetic construct
  source 1..25: mol_type = other DNA; mol_type = other DNA
tatatgcacactcgctggtgcagac

SEQ ID NO: 4790 - DNA, 25 bp, synthetic construct
  source 1..25: mol_type = other DNA; mol_type = other DNA
gtatatgcacactcgctggtgcagg

SEQ ID NO: 4791 - DNA, 25 bp, synthetic construct
  source 1..25: mol_type = other DNA; mol_type = other DNA
gtatatgcacactcgctggtgcaga

SEQ ID NO: 4792 - DNA, 25 bp, synthetic construct
  source 1..25: mol_type = other DNA; mol_type = other DNA
agtatatgcacactcgctggtgcag

SEQ ID NO: 4793 - DNA, 25 bp, synthetic construct
  source 1..25: mol_type = other DNA; mol_type = other DNA
agtatatgcacactcgctggtgcaa

SEQ ID NO: 4794 - DNA, 25 bp, synthetic construct
  source 1..25: mol_type = other DNA; mol_type = other DNA
aagtatatgcacactcgctggtaca

SEQ ID NO: 4795 - DNA, 25 bp, synthetic construct
  source 1..25: mol_type = other DNA; mol_type = other DNA
caagtatatgcacactcgctggtgc

SEQ ID NO: 4796 - DNA, 25 bp, synthetic construct
  source 1..25: mol_type = other DNA; mol_type = other DNA
caagtatatgcacactcgctggtac

SEQ ID NO: 4797 - DNA, 25 bp, synthetic construct
  source 1..25: mol_type = other DNA; mol_type = other DNA
gcaagtatatgcacactcgctggtg

SEQ ID NO: 4798 - DNA, 25 bp, synthetic construct
  source 1..25: mol_type = other DNA; mol_type = other DNA
gcaagtatatgcacactcgctggta

SEQ ID NO: 4799 - DNA, 25 bp, synthetic construct
  source 1..25: mol_type = other DNA; mol_type = other DNA
ggcaagtatatgcacactcgctgat

SEQ ID NO: 4800 - DNA, 25 bp, synthetic construct
  source 1..25: mol_type = other DNA; mol_type = other DNA
aggcaagtatatgcacactcgctgg

SEQ ID NO: 4801 - DNA, 25 bp, synthetic construct
  source 1..25: mol_type = other DNA; mol_type = other DNA
aggcaagtatatgcacactcgctga

SEQ ID NO: 4802 - DNA, 25 bp, synthetic construct
  source 1..25: mol_type = other DNA; mol_type = other DNA
gaggcaagtatatgcacactcgctg

SEQ ID NO: 4803 - DNA, 25 bp, synthetic construct
  source 1..25: mol_type = other DNA; mol_type = other DNA
gaggcaagtatatgcacactcgcta

SEQ ID NO: 4804 - DNA, 25 bp, synthetic construct
  source 1..25: mol_type = other DNA; mol_type = other DNA
agaggcaagtatatgcacactcact

SEQ ID NO: 4805 - DNA, 25 bp, synthetic construct
  source 1..25: mol_type = other DNA; mol_type = other DNA
aagaggcaagtatatgcacactcgc

SEQ ID NO: 4806 - DNA, 25 bp, synthetic construct
  source 1..25: mol_type = other DNA; mol_type = other DNA
aagaggcaagtatatgcacactcac

SEQ ID NO: 4807 - DNA, 25 bp, synthetic construct
  source 1..25: mol_type = other DNA; mol_type = other DNA
gaagaggcaagtatatgcacactcg

SEQ ID NO: 4808 - DNA, 25 bp, synthetic construct
  source 1..25: mol_type = other DNA; mol_type = other DNA
gaagaggcaagtatatgcacactca

SEQ ID NO: 4809 - DNA, 25 bp, synthetic construct
  source 1..25: mol_type = other DNA; mol_type = other DNA
agaagaggcaagtatatacacactc

SEQ ID NO: 4810 - DNA, 25 bp, synthetic construct
  source 1..25: mol_type = other DNA; mol_type = other DNA
cagaagaggcaagtatatgcacact

SEQ ID NO: 4811 - DNA, 25 bp, synthetic construct
  source 1..25: mol_type = other DNA; mol_type = other DNA
cagaagaggcaagtatatacacact

SEQ ID NO: 4812 - DNA, 25 bp, synthetic construct
  source 1..25: mol_type = other DNA; mol_type = other DNA
ccagaagaggcaagtatatgcacac

SEQ ID NO: 4813 - DNA, 25 bp, synthetic construct
  source 1..25: mol_type = other DNA; mol_type = other DNA
ccagaagaggcaagtatatacacac

SEQ ID NO: 4814 - DNA, 25 bp, synthetic construct
  source 1..25: mol_type = other DNA; mol_type = other DNA
cccagaagaggcaagtatatacaca

SEQ ID NO: 4815 - DNA, 25 bp, synthetic construct
  source 1..25: mol_type = other DNA; mol_type = other DNA
ccccagaagaggcaagtatatgcac

SEQ ID NO: 4816 - DNA, 25 bp, synthetic construct
  source 1..25: mol_type = other DNA; mol_type = other DNA
ccccagaagaggcaagtatatacac

SEQ ID NO: 4817 - DNA, 25 bp, synthetic construct
  source 1..25: mol_type = other DNA; mol_type = other DNA
cccccagaagaggcaagtatatgca

SEQ ID NO: 4818 - DNA, 25 bp, synthetic construct
  source 1..25: mol_type = other DNA; mol_type = other DNA
cccccagaagaggcaagtatataca

SEQ ID NO: 4819 - DNA, 25 bp, synthetic construct
  source 1..25: mol_type = other DNA; mol_type = other DNA
acccccagaagaggcaagtatatac

SEQ ID NO: 4820 - DNA, 25 bp, synthetic construct
  source 1..25: mol_type = other DNA; mol_type = other DNA
cacccccagaagaggcaagtatatg

SEQ ID NO: 4821 - DNA, 25 bp, synthetic construct
  source 1..25: mol_type = other DNA; mol_type = other DNA
cacccccagaagaggcaagtatata

SEQ ID NO: 4822 - DNA, 25 bp, synthetic construct
  source 1..25: mol_type = other DNA; mol_type = other DNA
acacccccagaagaggcaagtatat

SEQ ID NO: 4823 - DNA, 25 bp, synthetic construct
  source 1..25: mol_type = other DNA; mol_type = other DNA
acacccccagaagaggcaaatatat

SEQ ID NO: 4824 - DNA, 25 bp, synthetic construct
  source 1..25: mol_type = other DNA; mol_type = other DNA
tacacccccagaagaggcaaatata

SEQ ID NO: 4825 - DNA, 25 bp, synthetic construct
  source 1..25: mol_type = other DNA; mol_type = other DNA
atacacccccagaagaggcaagtat

SEQ ID NO: 4826 - DNA, 25 bp, synthetic construct
  source 1..25: mol_type = other DNA; mol_type = other DNA
atacacccccagaagaggcaaatat

SEQ ID NO: 4827 - DNA, 25 bp, synthetic construct
  source 1..25: mol_type = other DNA; mol_type = other DNA
catacacccccagaagaggcaagta

SEQ ID NO: 4828 - DNA, 25 bp, synthetic construct
  source 1..25: mol_type = other DNA; mol_type = other DNA
catacacccccagaagaggcaaata

SEQ ID NO: 4829 - DNA, 25 bp, synthetic construct
  source 1..25: mol_type = other DNA; mol_type = other DNA
acatacacccccagaagaggcaaat

SEQ ID NO: 4830 - DNA, 25 bp, synthetic construct
  source 1..25: mol_type = other DNA; mol_type = other DNA
cacatacacccccagaagaggcaag

SEQ ID NO: 4831 - DNA, 25 bp, synthetic construct
  source 1..25: mol_type = other DNA; mol_type = other DNA
cacatacacccccagaagaggcaaa

SEQ ID NO: 4832 - DNA, 25 bp, synthetic construct
  source 1..25: mol_type = other DNA; mol_type = other DNA
acacatacacccccagaagaggcaa

SEQ ID NO: 4833 - DNA, 25 bp, synthetic construct
  source 1..25: mol_type = other DNA; mol_type = other DNA
acacatacacccccagaagagacaa

SEQ ID NO: 4834 - DNA, 25 bp, synthetic construct
  source 1..25: mol_type = other DNA; mol_type = other DNA
cacacatacacccccagaagagaca

SEQ ID NO: 4835 - DNA, 25 bp, synthetic construct
  source 1..25: mol_type = other DNA; mol_type = other DNA
acacacatacacccccagaagaggc

SEQ ID NO: 4836 - DNA, 25 bp, synthetic construct
  source 1..25: mol_type = other DNA; mol_type = other DNA
acacacatacacccccagaagagac

SEQ ID NO: 4837 - DNA, 25 bp, synthetic construct
  source 1..25: mol_type = other DNA; mol_type = other DNA
cacacacatacacccccagaagagg

SEQ ID NO: 4838 - DNA, 25 bp, synthetic construct
  source 1..25: mol_type = other DNA; mol_type = other DNA
cacacacatacacccccagaagaga

SEQ ID NO: 4839 - DNA, 25 bp, synthetic construct
  source 1..25: mol_type = other DNA; mol_type = other DNA
acacacacatacacccccagaagaa

SEQ ID NO: 4840 - DNA, 25 bp, synthetic construct
  source 1..25: mol_type = other DNA; mol_type = other DNA
cacacacacatacacccccagaaga

SEQ ID NO: 4841 - DNA, 25 bp, synthetic construct
  source 1..25: mol_type = other DNA; mol_type = other DNA
cacacacacatacacccccagaaaa

SEQ ID NO: 4842 - DNA, 25 bp, synthetic construct
  source 1..25: mol_type = other DNA; mol_type = other DNA
ccacacacacatacacccccagaag

SEQ ID NO: 4843 - DNA, 25 bp, synthetic construct
  source 1..25: mol_type = other DNA; mol_type = other DNA
ccacacacacatacacccccagaaa

SEQ ID NO: 4844 - DNA, 25 bp, synthetic construct
  source 1..25: mol_type = other DNA; mol_type = other DNA
cccacacacacatacacccccaaaa

SEQ ID NO: 4845 - DNA, 25 bp, synthetic construct
  source 1..25: mol_type = other DNA; mol_type = other DNA
gcccacacacacatacacccccaga

SEQ ID NO: 4846 - DNA, 25 bp, synthetic construct
  source 1..25: mol_type = other DNA; mol_type = other DNA
gcccacacacacatacacccccaaa

SEQ ID NO: 4847 - DNA, 25 bp, synthetic construct
  source 1..25: mol_type = other DNA; mol_type = other DNA
tgcccacacacacatacacccccag

SEQ ID NO: 4848 - DNA, 25 bp, synthetic construct
  source 1..25: mol_type = other DNA; mol_type = other DNA
tgcccacacacacatacacccccaa

SEQ ID NO: 4849 - DNA, 25 bp, synthetic construct
  source 1..25: mol_type = other DNA; mol_type = other DNA
gtacccacacacacatacaccccca

SEQ ID NO: 4850 - DNA, 25 bp, synthetic construct
  source 1..25: mol_type = other DNA; mol_type = other DNA
tgtgcccacacacacatacaccccc

SEQ ID NO: 4851 - DNA, 25 bp, synthetic construct
  source 1..25: mol_type = other DNA; mol_type = other DNA
tgtacccacacacacatacaccccc

SEQ ID NO: 4852 - DNA, 25 bp, synthetic construct
  source 1..25: mol_type = other DNA; mol_type = other DNA
gtgtgcccacacacacatacacccc

SEQ ID NO: 4853 - DNA, 25 bp, synthetic construct
  source 1..25: mol_type = other DNA; mol_type = other DNA
gtgtacccacacacacatacacccc

SEQ ID NO: 4854 - DNA, 25 bp, synthetic construct
  source 1..25: mol_type = other DNA; mol_type = other DNA
tgtgtacccacacacacatacaccc

SEQ ID NO: 4855 - DNA, 25 bp, synthetic construct
  source 1..25: mol_type = other DNA; mol_type = other DNA
ctgtgtgcccacacacacatacacc

SEQ ID NO: 4856 - DNA, 25 bp, synthetic construct
  source 1..25: mol_type = other DNA; mol_type = other DNA
ctgtgtacccacacacacatacacc

SEQ ID NO: 4857 - DNA, 25 bp, synthetic construct
  source 1..25: mol_type = other DNA; mol_type = other DNA
cctgtgtgcccacacacacatacac

SEQ ID NO: 4858 - DNA, 25 bp, synthetic construct
  source 1..25: mol_type = other DNA; mol_type = other DNA
cctgtgtacccacacacacatacac

SEQ ID NO: 4859 - DNA, 25 bp, synthetic construct
  source 1..25: mol_type = other DNA; mol_type = other DNA
acctgtgtacccacacacacataca

SEQ ID NO: 4860 - DNA, 25 bp, synthetic construct
  source 1..25: mol_type = other DNA; mol_type = other DNA
cacctgtgtgcccacacacacatac

SEQ ID NO: 4861 - DNA, 25 bp, synthetic construct
  source 1..25: mol_type = other DNA; mol_type = other DNA
cacctgtgtacccacacacacatac

SEQ ID NO: 4862 - DNA, 25 bp, synthetic construct
  source 1..25: mol_type = other DNA; mol_type = other DNA
tcacctgtgtgcccacacacacata

SEQ ID NO: 4863 - DNA, 25 bp, synthetic construct
  source 1..25: mol_type = other DNA; mol_type = other DNA
tcacctgtgtacccacacacacata

SEQ ID NO: 4864 - DNA, 25 bp, synthetic construct
  source 1..25: mol_type = other DNA; mol_type = other DNA
gtcacctgtgtacccacacacacat

SEQ ID NO: 4865 - DNA, 25 bp, synthetic construct
  source 1..25: mol_type = other DNA; mol_type = other DNA
ggtcacctgtgtgcccacacacaca

SEQ ID NO: 4866 - DNA, 25 bp, synthetic construct
  source 1..25: mol_type = other DNA; mol_type = other DNA
ggtcacctgtgtacccacacacaca

SEQ ID NO: 4867 - DNA, 25 bp, synthetic construct
  source 1..25: mol_type = other DNA; mol_type = other DNA
gggtcacctgtgtgcccacacacac

SEQ ID NO: 4868 - DNA, 25 bp, synthetic construct
  source 1..25: mol_type = other DNA; mol_type = other DNA
gggtcacctgtgtacccacacacac

SEQ ID NO: 4869 - DNA, 25 bp, synthetic construct
  source 1..25: mol_type = other DNA; mol_type = other DNA
agggtcacctgtgtacccacacaca

SEQ ID NO: 4870 - DNA, 25 bp, synthetic construct
  source 1..25: mol_type = other DNA; mol_type = other DNA
cagggtcacctgtgtgcccacacac

SEQ ID NO: 4871 - DNA, 25 bp, synthetic construct
  source 1..25: mol_type = other DNA; mol_type = other DNA
cagggtcacctgtgtacccacacac

SEQ ID NO: 4872 - DNA, 25 bp, synthetic construct
  source 1..25: mol_type = other DNA; mol_type = other DNA
acagggtcacctgtgtgcccacaca

SEQ ID NO: 4873 - DNA, 25 bp, synthetic construct
  source 1..25: mol_type = other DNA; mol_type = other DNA
acagggtcacctgtgtacccacaca

SEQ ID NO: 4874 - DNA, 25 bp, synthetic construct
  source 1..25: mol_type = other DNA; mol_type = other DNA
tacagggtcacctgtgtacccacac

SEQ ID NO: 4875 - DNA, 25 bp, synthetic construct
  source 1..25: mol_type = other DNA; mol_type = other DNA
gtacagggtcacctgtgtgcccaca

SEQ ID NO: 4876 - DNA, 25 bp, synthetic construct
  source 1..25: mol_type = other DNA; mol_type = other DNA
gtacagggtcacctgtgtacccaca

SEQ ID NO: 4877 - DNA, 25 bp, synthetic construct
  source 1..25: mol_type = other DNA; mol_type = other DNA
gaatgcacacatggcgtgcgcaggg

SEQ ID NO: 4878 - DNA, 25 bp, synthetic construct
  source 1..25: mol_type = other DNA; mol_type = other DNA
gaatgcacacatggcgtgcgcagga

SEQ ID NO: 4879 - DNA, 25 bp, synthetic construct
  source 1..25: mol_type = other DNA; mol_type = other DNA
ggaatgcacacatggcgtgcgcaga

SEQ ID NO: 4880 - DNA, 25 bp, synthetic construct
  source 1..25: mol_type = other DNA; mol_type = other DNA
aggaatgcacacatggcgtgcgcag

SEQ ID NO: 4881 - DNA, 25 bp, synthetic construct
  source 1..25: mol_type = other DNA; mol_type = other DNA
aggaatgcacacatggcgtgcgcaa

SEQ ID NO: 4882 - DNA, 25 bp, synthetic construct
  source 1..25: mol_type = other DNA; mol_type = other DNA
caggaatgcacacatggcgtgcgca

SEQ ID NO: 4883 - DNA, 25 bp, synthetic construct
  source 1..25: mol_type = other DNA; mol_type = other DNA
caggaatgcacacatggcgtgcaca

SEQ ID NO: 4884 - DNA, 25 bp, synthetic construct
  source 1..25: mol_type = other DNA; mol_type = other DNA
acaggaatgcacacatggcgtgcac

SEQ ID NO: 4885 - DNA, 25 bp, synthetic construct
  source 1..25: mol_type = other DNA; mol_type = other DNA
cacaggaatgcacacatggcgtgcg

SEQ ID NO: 4886 - DNA, 25 bp, synthetic construct
  source 1..25: mol_type = other DNA; mol_type = other DNA
cacaggaatgcacacatggcgtgca

SEQ ID NO: 4887 - DNA, 25 bp, synthetic construct
  source 1..25: mol_type = other DNA; mol_type = other DNA
acacaggaatgcacacatggcgtgc

SEQ ID NO: 4888 - DNA, 25 bp, synthetic construct
  source 1..25: mol_type = other DNA; mol_type = other DNA
acacaggaatgcacacatggcgtac

SEQ ID NO: 4889 - DNA, 25 bp, synthetic construct
  source 1..25: mol_type = other DNA; mol_type = other DNA
cacacaggaatgcacacatggcgta

SEQ ID NO: 4890 - DNA, 25 bp, synthetic construct
  source 1..25: mol_type = other DNA; mol_type = other DNA
gcacacaggaatgcacacatggcgt

SEQ ID NO: 4891 - DNA, 25 bp, synthetic construct
  source 1..25: mol_type = other DNA; mol_type = other DNA
gcacacaggaatgcacacatggcat

SEQ ID NO: 4892 - DNA, 25 bp, synthetic construct
  source 1..25: mol_type = other DNA; mol_type = other DNA
cgcacacaggaatgcacacatggcg

SEQ ID NO: 4893 - DNA, 25 bp, synthetic construct
  source 1..25: mol_type = other DNA; mol_type = other DNA
cgcacacaggaatgcacacatggca

SEQ ID NO: 4894 - DNA, 25 bp, synthetic construct
  source 1..25: mol_type = other DNA; mol_type = other DNA
gcgcacacaggaatgcacacatgac

SEQ ID NO: 4895 - DNA, 25 bp, synthetic construct
  source 1..25: mol_type = other DNA; mol_type = other DNA
tgcgcacacaggaatgcacacatgg

SEQ ID NO: 4896 - DNA, 25 bp, synthetic construct
  source 1..25: mol_type = other DNA; mol_type = other DNA
tgcgcacacaggaatgcacacatga

SEQ ID NO: 4897 - DNA, 25 bp, synthetic construct
  source 1..25: mol_type = other DNA; mol_type = other DNA
atgcgcacacaggaatgcacacatg

SEQ ID NO: 4898 - DNA, 25 bp, synthetic construct
  source 1..25: mol_type = other DNA; mol_type = other DNA
atgcgcacacaggaatgcacacata

SEQ ID NO: 4899 - DNA, 25 bp, synthetic construct
  source 1..25: mol_type = other DNA; mol_type = other DNA
catgcgcacacaggaatacacacat

SEQ ID NO: 4900 - DNA, 25 bp, synthetic construct
  source 1..25: mol_type = other DNA; mol_type = other DNA
acatgcgcacacaggaatgcacaca

SEQ ID NO: 4901 - DNA, 25 bp, synthetic construct
  source 1..25: mol_type = other DNA; mol_type = other DNA
acatgcgcacacaggaatacacaca

SEQ ID NO: 4902 - DNA, 25 bp, synthetic construct
  source 1..25: mol_type = other DNA; mol_type = other DNA
cacatgcgcacacaggaatgcacac

SEQ ID NO: 4903 - DNA, 25 bp, synthetic construct
  source 1..25: mol_type = other DNA; mol_type = other DNA
cacatgcgcacacaggaatacacac

SEQ ID NO: 4904 - DNA, 25 bp, synthetic construct
  source 1..25: mol_type = other DNA; mol_type = other DNA
gcacatgcgcacacaggaatacaca

SEQ ID NO: 4905 - DNA, 25 bp, synthetic construct
  source 1..25: mol_type = other DNA; mol_type = other DNA
agcacatgcgcacacaggaatgcac

SEQ ID NO: 4906 - DNA, 25 bp, synthetic construct
  source 1..25: mol_type = other DNA; mol_type = other DNA
agcacatgcgcacacaggaatacac

SEQ ID NO: 4907 - DNA, 25 bp, synthetic construct
  source 1..25: mol_type = other DNA; mol_type = other DNA
cagcacatgcgcacacaggaatgca

SEQ ID NO: 4908 - DNA, 25 bp, synthetic construct
  source 1..25: mol_type = other DNA; mol_type = other DNA
cagcacatgcgcacacaggaataca

SEQ ID NO: 4909 - DNA, 25 bp, synthetic construct
  source 1..25: mol_type = other DNA; mol_type = other DNA
acagcacatgcgcacacaggaatac

SEQ ID NO: 4910 - DNA, 25 bp, synthetic construct
  source 1..25: mol_type = other DNA; mol_type = other DNA
aacagcacatgcgcacacaggaatg

SEQ ID NO: 4911 - DNA, 25 bp, synthetic construct
  source 1..25: mol_type = other DNA; mol_type = other DNA
aacagcacatgcgcacacaggaata

SEQ ID NO: 4912 - DNA, 25 bp, synthetic construct
  source 1..25: mol_type = other DNA; mol_type = other DNA
caacagcacatgcgcacacaggaat

SEQ ID NO: 4913 - DNA, 25 bp, synthetic construct
  source 1..25: mol_type = other DNA; mol_type = other DNA
caacagcacatgcgcacacagaaat

SEQ ID NO: 4914 - DNA, 25 bp, synthetic construct
  source 1..25: mol_type = other DNA; mol_type = other DNA
acaacagcacatgcgcacacagaaa

SEQ ID NO: 4915 - DNA, 25 bp, synthetic construct
  source 1..25: mol_type = other DNA; mol_type = other DNA
cacaacagcacatgcgcacacagga

SEQ ID NO: 4916 - DNA, 25 bp, synthetic construct
  source 1..25: mol_type = other DNA; mol_type = other DNA
cacaacagcacatgcgcacacagaa

SEQ ID NO: 4917 - DNA, 25 bp, synthetic construct
  source 1..25: mol_type = other DNA; mol_type = other DNA
gcacaacagcacatgcgcacacagg

SEQ ID NO: 4918 - DNA, 25 bp, synthetic construct
  source 1..25: mol_type = other DNA; mol_type = other DNA
gcacaacagcacatgcgcacacaga

SEQ ID NO: 4919 - DNA, 25 bp, synthetic construct
  source 1..25: mol_type = other DNA; mol_type = other DNA
agcacaacagcacatgcgcacacaa

SEQ ID NO: 4920 - DNA, 25 bp, synthetic construct
  source 1..25: mol_type = other DNA; mol_type = other DNA
gagcacaacagcacatgcgcacaca

SEQ ID NO: 4921 - DNA, 25 bp, synthetic construct
  source 1..25: mol_type = other DNA; mol_type = other DNA
gagcacaacagcacatgcacacaca

SEQ ID NO: 4922 - DNA, 25 bp, synthetic construct
  source 1..25: mol_type = other DNA; mol_type = other DNA
cgagcacaacagcacatgcgcacac

SEQ ID NO: 4923 - DNA, 25 bp, synthetic construct
  source 1..25: mol_type = other DNA; mol_type = other DNA
cgagcacaacagcacatgcacacac

SEQ ID NO: 4924 - DNA, 25 bp, synthetic construct
  source 1..25: mol_type = other DNA; mol_type = other DNA
ccgagcacaacagcacatgcacaca

SEQ ID NO: 4925 - DNA, 25 bp, synthetic construct
  source 1..25: mol_type = other DNA; mol_type = other DNA
tccgagcacaacagcacatgcgcac

SEQ ID NO: 4926 - DNA, 25 bp, synthetic construct
  source 1..25: mol_type = other DNA; mol_type = other DNA
tccgagcacaacagcacatgcacac

SEQ ID NO: 4927 - DNA, 25 bp, synthetic construct
  source 1..25: mol_type = other DNA; mol_type = other DNA
atccgagcacaacagcacatgcgca

SEQ ID NO: 4928 - DNA, 25 bp, synthetic construct
  source 1..25: mol_type = other DNA; mol_type = other DNA
atccgagcacaacagcacatgcaca

SEQ ID NO: 4929 - DNA, 25 bp, synthetic construct
  source 1..25: mol_type = other DNA; mol_type = other DNA
catccgagcacaacagcacatgcac

SEQ ID NO: 4930 - DNA, 25 bp, synthetic construct
  source 1..25: mol_type = other DNA; mol_type = other DNA
ccatccgagcacaacagcacatgcg

SEQ ID NO: 4931 - DNA, 25 bp, synthetic construct
  source 1..25: mol_type = other DNA; mol_type = other DNA
ccatccgagcacaacagcacatgca

SEQ ID NO: 4932 - DNA, 25 bp, synthetic construct
  source 1..25: mol_type = other DNA; mol_type = other DNA
accatccgagcacaacagcacatgc

SEQ ID NO: 4933 - DNA, 25 bp, synthetic construct
  source 1..25: mol_type = other DNA; mol_type = other DNA
accatccgagcacaacagcacatac

SEQ ID NO: 4934 - DNA, 25 bp, synthetic construct
  source 1..25: mol_type = other DNA; mol_type = other DNA
gaccatccgagcacaacagcacata

SEQ ID NO: 4935 - DNA, 25 bp, synthetic construct
  source 1..25: mol_type = other DNA; mol_type = other DNA
agaccatccgagcacaacagcacat

SEQ ID NO: 4936 - DNA, 25 bp, synthetic construct
  source 1..25: mol_type = other DNA; mol_type = other DNA
agaccatccgagcacaacaacacat

SEQ ID NO: 4937 - DNA, 25 bp, synthetic construct
  source 1..25: mol_type = other DNA; mol_type = other DNA
gagaccatccgagcacaacagcaca

SEQ ID NO: 4938 - DNA, 25 bp, synthetic construct
  source 1..25: mol_type = other DNA; mol_type = other DNA
gagaccatccgagcacaacaacaca

SEQ ID NO: 4939 - DNA, 25 bp, synthetic construct
  source 1..25: mol_type = other DNA; mol_type = other DNA
agagaccatccgagcacaacaacac

SEQ ID NO: 4940 - DNA, 25 bp, synthetic construct
  source 1..25: mol_type = other DNA; mol_type = other DNA
gagagaccatccgagcacaacagca

SEQ ID NO: 4941 - DNA, 25 bp, synthetic construct
  source 1..25: mol_type = other DNA; mol_type = other DNA
gagagaccatccgagcacaacaaca

SEQ ID NO: 4942 - DNA, 25 bp, synthetic construct
  source 1..25: mol_type = other DNA; mol_type = other DNA
ggagagaccatccgagcacaacagc

SEQ ID NO: 4943 - DNA, 25 bp, synthetic construct
  source 1..25: mol_type = other DNA; mol_type = other DNA
ggagagaccatccgagcacaacaac

SEQ ID NO: 4944 - DNA, 25 bp, synthetic construct
  source 1..25: mol_type = other DNA; mol_type = other DNA
tggagagaccatccgagcacaacaa

SEQ ID NO: 4945 - DNA, 25 bp, synthetic construct
  source 1..25: mol_type = other DNA; mol_type = other DNA
ctggagagaccatccgagcacaaca

SEQ ID NO: 4946 - DNA, 25 bp, synthetic construct
  source 1..25: mol_type = other DNA; mol_type = other DNA
ctggagagaccatccgaacacaaca

SEQ ID NO: 4947 - DNA, 25 bp, synthetic construct
  source 1..25: mol_type = other DNA; mol_type = other DNA
gctggagagaccatccgagcacaac

SEQ ID NO: 4948 - DNA, 25 bp, synthetic construct
  source 1..25: mol_type = other DNA; mol_type = other DNA
gctggagagaccatccgaacacaac

SEQ ID NO: 4949 - DNA, 25 bp, synthetic construct
  source 1..25: mol_type = other DNA; mol_type = other DNA
ggctggagagaccatccgaacacaa

SEQ ID NO: 4950 - DNA, 25 bp, synthetic construct
  source 1..25: mol_type = other DNA; mol_type = other DNA
tggctggagagaccatccgagcaca

SEQ ID NO: 4951 - DNA, 25 bp, synthetic construct
  source 1..25: mol_type = other DNA; mol_type = other DNA
tggctggagagaccatccgaacaca

SEQ ID NO: 4952 - DNA, 25 bp, synthetic construct
  source 1..25: mol_type = other DNA; mol_type = other DNA
gtggctggagagaccatccgagcac

SEQ ID NO: 4953 - DNA, 25 bp, synthetic construct
  source 1..25: mol_type = other DNA; mol_type = other DNA
gtggctggagagaccatccgaacac

SEQ ID NO: 4954 - DNA, 25 bp, synthetic construct
  source 1..25: mol_type = other DNA; mol_type = other DNA
ggtggctggagagaccatccgaaca

SEQ ID NO: 4955 - DNA, 25 bp, synthetic construct
  source 1..25: mol_type = other DNA; mol_type = other DNA
gggtggctggagagaccatccgagc

SEQ ID NO: 4956 - DNA, 25 bp, synthetic construct
  source 1..25: mol_type = other DNA; mol_type = other DNA
gggtggctggagagaccatccgaac

SEQ ID NO: 4957 - DNA, 25 bp, synthetic construct
  source 1..25: mol_type = other DNA; mol_type = other DNA
tgggtggctggagagaccatccgag

SEQ ID NO: 4958 - DNA, 25 bp, synthetic construct
  source 1..25: mol_type = other DNA; mol_type = other DNA
tgggtggctggagagaccatccgaa

SEQ ID NO: 4959 - DNA, 25 bp, synthetic construct
  source 1..25: mol_type = other DNA; mol_type = other DNA
ctgggtggctggagagaccatccaa

SEQ ID NO: 4960 - DNA, 25 bp, synthetic construct
  source 1..25: mol_type = other DNA; mol_type = other DNA
gctgggtggctggagagaccatccg

SEQ ID NO: 4961 - DNA, 25 bp, synthetic construct
  source 1..25: mol_type = other DNA; mol_type = other DNA
gctgggtggctggagagaccatcca

SEQ ID NO: 4962 - DNA, 25 bp, synthetic construct
  source 1..25: mol_type = other DNA; mol_type = other DNA
agctgggtggctggagagaccatcc

SEQ ID NO: 4963 - DNA, 25 bp, synthetic construct
  source 1..25: mol_type = other DNA; mol_type = other DNA
agctgggtggctggagaaaccatcc

SEQ ID NO: 4964 - DNA, 25 bp, synthetic construct
  source 1..25: mol_type = other DNA; mol_type = other DNA
cagctgggtggctggagaaaccatc

SEQ ID NO: 4965 - DNA, 25 bp, synthetic construct
  source 1..25: mol_type = other DNA; mol_type = other DNA
acagctgggtggctggagagaccat

SEQ ID NO: 4966 - DNA, 25 bp, synthetic construct
  source 1..25: mol_type = other DNA; mol_type = other DNA
acagctgggtggctggagaaaccat

SEQ ID NO: 4967 - DNA, 25 bp, synthetic construct
  source 1..25: mol_type = other DNA; mol_type = other DNA
cacagctgggtggctggagagacca

SEQ ID NO: 4968 - DNA, 25 bp, synthetic construct
  source 1..25: mol_type = other DNA; mol_type = other DNA
cacagctgggtggctggagaaacca

SEQ ID NO: 4969 - DNA, 25 bp, synthetic construct
  source 1..25: mol_type = other DNA; mol_type = other DNA
tcacagctgggtggctggagaaacc

SEQ ID NO: 4970 - DNA, 25 bp, synthetic construct
  source 1..25: mol_type = other DNA; mol_type = other DNA
atcacagctgggtggctggagagac

SEQ ID NO: 4971 - DNA, 25 bp, synthetic construct
  source 1..25: mol_type = other DNA; mol_type = other DNA
atcacagctgggtggctggagaaac

SEQ ID NO: 4972 - DNA, 25 bp, synthetic construct
  source 1..25: mol_type = other DNA; mol_type = other DNA
aatcacagctgggtggctggagaga

SEQ ID NO: 4973 - DNA, 25 bp, synthetic construct
  source 1..25: mol_type = other DNA; mol_type = other DNA
aatcacagctgggtggctggagaaa

SEQ ID NO: 4974 - DNA, 25 bp, synthetic construct
  source 1..25: mol_type = other DNA; mol_type = other DNA
gaatcacagctgggtggctggagaa

SEQ ID NO: 4975 - DNA, 25 bp, synthetic construct
  source 1..25: mol_type = other DNA; mol_type = other DNA
ggaatcacagctgggtggctggaga

SEQ ID NO: 4976 - DNA, 25 bp, synthetic construct
  source 1..25: mol_type = other DNA; mol_type = other DNA
ggaatcacagctgggtggctggaaa

SEQ ID NO: 4977 - DNA, 25 bp, synthetic construct
  source 1..25: mol_type = other DNA; mol_type = other DNA
gggaatcacagctgggtggctggag

SEQ ID NO: 4978 - DNA, 25 bp, synthetic construct
  source 1..25: mol_type = other DNA; mol_type = other DNA
gggaatcacagctgggtggctggaa

SEQ ID NO: 4979 - DNA, 25 bp, synthetic construct
  source 1..25: mol_type = other DNA; mol_type = other DNA
agggaatcacagctgggtggctgaa

SEQ ID NO: 4980 - DNA, 25 bp, synthetic construct
  source 1..25: mol_type = other DNA; mol_type = other DNA
gagggaatcacagctgggtggctgg

SEQ ID NO: 4981 - DNA, 25 bp, synthetic construct
  source 1..25: mol_type = other DNA; mol_type = other DNA
gagggaatcacagctgggtggctga

SEQ ID NO: 4982 - DNA, 25 bp, synthetic construct
  source 1..25: mol_type = other DNA; mol_type = other DNA
agagggaatcacagctgggtggctg

SEQ ID NO: 4983 - DNA, 25 bp, synthetic construct
  source 1..25: mol_type = other DNA; mol_type = other DNA
agagggaatcacagctgggtggcta

SEQ ID NO: 4984 - DNA, 25 bp, synthetic construct
  source 1..25: mol_type = other DNA; mol_type = other DNA
aagagggaatcacagctgggtgact

SEQ ID NO: 4985 - DNA, 25 bp, synthetic construct
  source 1..25: mol_type = other DNA; mol_type = other DNA
gaagagggaatcacagctgggtggc

SEQ ID NO: 4986 - DNA, 25 bp, synthetic construct
  source 1..25: mol_type = other DNA; mol_type = other DNA
gaagagggaatcacagctgggtgac

SEQ ID NO: 4987 - DNA, 25 bp, synthetic construct
  source 1..25: mol_type = other DNA; mol_type = other DNA
ggaagagggaatcacagctgggtgg

SEQ ID NO: 4988 - DNA, 25 bp, synthetic construct
  source 1..25: mol_type = other DNA; mol_type = other DNA
ggaagagggaatcacagctgggtga

SEQ ID NO: 4989 - DNA, 25 bp, synthetic construct
  source 1..25: mol_type = other DNA; mol_type = other DNA
gggaagagggaatcacagctgggta

SEQ ID NO: 4990 - DNA, 25 bp, synthetic construct
  source 1..25: mol_type = other DNA; mol_type = other DNA
tgggaagagggaatcacagctgggt

SEQ ID NO: 4991 - DNA, 25 bp, synthetic construct
  source 1..25: mol_type = other DNA; mol_type = other DNA
gtggaagagggaatcacagctgggt

SEQ ID NO: 4992 - DNA, 25 bp, synthetic construct
  source 1..25: mol_type = other DNA; mol_type = other DNA
ggtgaagagggaatcacagctgggt

SEQ ID NO: 4993 - DNA, 25 bp, synthetic construct
  source 1..25: mol_type = other DNA; mol_type = other DNA
gggtaagagggaatcacagctgggt

SEQ ID NO: 4994 - DNA, 25 bp, synthetic construct
  source 1..25: mol_type = other DNA; mol_type = other DNA
agggaagagagaatcacagctgggt

SEQ ID NO: 4995 - DNA, 25 bp, synthetic construct
  source 1..25: mol_type = other DNA; mol_type = other DNA
agggaagagggaatcacagctgagt

SEQ ID NO: 4996 - DNA, 25 bp, synthetic construct
  source 1..25: mol_type = other DNA; mol_type = other DNA
gaggaagagagaatcacagctgggt

SEQ ID NO: 4997 - DNA, 25 bp, synthetic construct
  source 1..25: mol_type = other DNA; mol_type = other DNA
gaggaagagggaatcacagctgagt

SEQ ID NO: 4998 - DNA, 25 bp, synthetic construct
  source 1..25: mol_type = other DNA; mol_type = other DNA
ggagaagagagaatcacagctgggt

SEQ ID NO: 4999 - DNA, 25 bp, synthetic construct
  source 1..25: mol_type = other DNA; mol_type = other DNA
ggagaagagggaatcacagctgagt

SEQ ID NO: 5000 - DNA, 25 bp, synthetic construct
  source 1..25: mol_type = other DNA; mol_type = other DNA
gggaaagagagaatcacagctgggt

SEQ ID NO: 5001 - DNA, 25 bp, synthetic construct
  source 1..25: mol_type = other DNA; mol_type = other DNA
gggaaagagggaatcacagctgagt

SEQ ID NO: 5002 - DNA, 25 bp, synthetic construct
  source 1..25: mol_type = other DNA; mol_type = other DNA
ctgggaagagggaatcacagctggg

SEQ ID NO: 5003 - DNA, 25 bp, synthetic construct
  source 1..25: mol_type = other DNA; mol_type = other DNA
cgtggaagagggaatcacagctggg

SEQ ID NO: 5004 - DNA, 25 bp, synthetic construct
  source 1..25: mol_type = other DNA; mol_type = other DNA
cggtgaagagggaatcacagctggg

SEQ ID NO: 5005 - DNA, 25 bp, synthetic construct
  source 1..25: mol_type = other DNA; mol_type = other DNA
cgggtaagagggaatcacagctggg

SEQ ID NO: 5006 - DNA, 25 bp, synthetic construct
  source 1..25: mol_type = other DNA; mol_type = other DNA
cagggaagagagaatcacagctggg

SEQ ID NO: 5007 - DNA, 25 bp, synthetic construct
  source 1..25: mol_type = other DNA; mol_type = other DNA
cagggaagagggaatcacagctgag

SEQ ID NO: 5008 - DNA, 25 bp, synthetic construct
  source 1..25: mol_type = other DNA; mol_type = other DNA
cgaggaagagagaatcacagctggg

SEQ ID NO: 5009 - DNA, 25 bp, synthetic construct
  source 1..25: mol_type = other DNA; mol_type = other DNA
cgaggaagagggaatcacagctgag

SEQ ID NO: 5010 - DNA, 25 bp, synthetic construct
  source 1..25: mol_type = other DNA; mol_type = other DNA
cggagaagagagaatcacagctggg

SEQ ID NO: 5011 - DNA, 25 bp, synthetic construct
  source 1..25: mol_type = other DNA; mol_type = other DNA
cggagaagagggaatcacagctgag

SEQ ID NO: 5012 - DNA, 25 bp, synthetic construct
  source 1..25: mol_type = other DNA; mol_type = other DNA
cgggaaagagagaatcacagctggg

SEQ ID NO: 5013 - DNA, 25 bp, synthetic construct
  source 1..25: mol_type = other DNA; mol_type = other DNA
cgggaaagagggaatcacagctgag

SEQ ID NO: 5014 - DNA, 25 bp, synthetic construct
  source 1..25: mol_type = other DNA; mol_type = other DNA
gctgggaagagggaatcacagctgg

SEQ ID NO: 5015 - DNA, 25 bp, synthetic construct
  source 1..25: mol_type = other DNA; mol_type = other DNA
gcgtggaagagggaatcacagctgg

SEQ ID NO: 5016 - DNA, 25 bp, synthetic construct
  source 1..25: mol_type = other DNA; mol_type = other DNA
gcggtgaagagggaatcacagctgg

SEQ ID NO: 5017 - DNA, 25 bp, synthetic construct
  source 1..25: mol_type = other DNA; mol_type = other DNA
gcgggtaagagggaatcacagctgg

SEQ ID NO: 5018 - DNA, 25 bp, synthetic construct
  source 1..25: mol_type = other DNA; mol_type = other DNA
gcagggaagagagaatcacagctgg

SEQ ID NO: 5019 - DNA, 25 bp, synthetic construct
  source 1..25: mol_type = other DNA; mol_type = other DNA
gcagggaagagggaatcacagctga

SEQ ID NO: 5020 - DNA, 25 bp, synthetic construct
  source 1..25: mol_type = other DNA; mol_type = other DNA
gcgaggaagagagaatcacagctgg

SEQ ID NO: 5021 - DNA, 25 bp, synthetic construct
  source 1..25: mol_type = other DNA; mol_type = other DNA
gcgaggaagagggaatcacagctga

SEQ ID NO: 5022 - DNA, 25 bp, synthetic construct
  source 1..25: mol_type = other DNA; mol_type = other DNA
gcggagaagagagaatcacagctgg

SEQ ID NO: 5023 - DNA, 25 bp, synthetic construct
  source 1..25: mol_type = other DNA; mol_type = other DNA
gcggagaagagggaatcacagctga

SEQ ID NO: 5024 - DNA, 25 bp, synthetic construct
  source 1..25: mol_type = other DNA; mol_type = other DNA
gcgggaaagagagaatcacagctgg

SEQ ID NO: 5025 - DNA, 25 bp, synthetic construct
  source 1..25: mol_type = other DNA; mol_type = other DNA
gcgggaaagagggaatcacagctga

SEQ ID NO: 5026 - DNA, 25 bp, synthetic construct
  source 1..25: mol_type = other DNA; mol_type = other DNA
tgctgggaagagggaatcacagctg

SEQ ID NO: 5027 - DNA, 25 bp, synthetic construct
  source 1..25: mol_type = other DNA; mol_type = other DNA
tgcgtggaagagggaatcacagctg

SEQ ID NO: 5028 - DNA, 25 bp, synthetic construct
  source 1..25: mol_type = other DNA; mol_type = other DNA
tgcggtgaagagggaatcacagctg

SEQ ID NO: 5029 - DNA, 25 bp, synthetic construct
  source 1..25: mol_type = other DNA; mol_type = other DNA
tgcgggtaagagggaatcacagctg

SEQ ID NO: 5030 - DNA, 25 bp, synthetic construct
  source 1..25: mol_type = other DNA; mol_type = other DNA
tgcaggaaagagggaatcacagctg

SEQ ID NO: 5031 - DNA, 25 bp, synthetic construct
  source 1..25: mol_type = other DNA; mol_type = other DNA
tgcagggaagagagaatcacagctg

SEQ ID NO: 5032 - DNA, 25 bp, synthetic construct
  source 1..25: mol_type = other DNA; mol_type = other DNA
tgcgagaaagagggaatcacagctg

SEQ ID NO: 5033 - DNA, 25 bp, synthetic construct
  source 1..25: mol_type = other DNA; mol_type = other DNA
tgcgaggaagagagaatcacagctg

SEQ ID NO: 5034 - DNA, 25 bp, synthetic construct
  source 1..25: mol_type = other DNA; mol_type = other DNA
tgcggagaagaaggaatcacagctg

SEQ ID NO: 5035 - DNA, 25 bp, synthetic construct
  source 1..25: mol_type = other DNA; mol_type = other DNA
tgcggagaagagggaatcacagcta

SEQ ID NO: 5036 - DNA, 25 bp, synthetic construct
  source 1..25: mol_type = other DNA; mol_type = other DNA
tgcgggaaagaaggaatcacagctg

SEQ ID NO: 5037 - DNA, 25 bp, synthetic construct
  source 1..25: mol_type = other DNA; mol_type = other DNA
tgcgggaaagagggaatcacagcta

SEQ ID NO: 5038 - DNA, 25 bp, synthetic construct
  source 1..25: mol_type = other DNA; mol_type = other DNA
ttgctgggaagagggaatcacagct

SEQ ID NO: 5039 - DNA, 25 bp, synthetic construct
  source 1..25: mol_type = other DNA; mol_type = other DNA
ttgcgtggaagagggaatcacagct

SEQ ID NO: 5040 - DNA, 25 bp, synthetic construct
  source 1..25: mol_type = other DNA; mol_type = other DNA
ttgcggtgaagagggaatcacagct

SEQ ID NO: 5041 - DNA, 25 bp, synthetic construct
  source 1..25: mol_type = other DNA; mol_type = other DNA
ttgcgggtaagagggaatcacagct

SEQ ID NO: 5042 - DNA, 25 bp, synthetic construct
  source 1..25: mol_type = other DNA; mol_type = other DNA
ttgcagagaagagggaatcacagct

SEQ ID NO: 5043 - DNA, 25 bp, synthetic construct
  source 1..25: mol_type = other DNA; mol_type = other DNA
ttgcagggaagagagaatcacagct

SEQ ID NO: 5044 - DNA, 25 bp, synthetic construct
  source 1..25: mol_type = other DNA; mol_type = other DNA
ttgcgaggaagaaggaatcacagct

SEQ ID NO: 5045 - DNA, 25 bp, synthetic construct
  source 1..25: mol_type = other DNA; mol_type = other DNA
ttgcgaggaagagagaatcacagct

SEQ ID NO: 5046 - DNA, 25 bp, synthetic construct
  source 1..25: mol_type = other DNA; mol_type = other DNA
ttgcggagaagaaggaatcacagct

SEQ ID NO: 5047 - DNA, 25 bp, synthetic construct
  source 1..25: mol_type = other DNA; mol_type = other DNA
ttgcggagaagagagaatcacagct

SEQ ID NO: 5048 - DNA, 25 bp, synthetic construct
  source 1..25: mol_type = other DNA; mol_type = other DNA
ttgcgggaaagaaggaatcacagct

SEQ ID NO: 5049 - DNA, 25 bp, synthetic construct
  source 1..25: mol_type = other DNA; mol_type = other DNA
ttgcgggaaagagagaatcacagct

SEQ ID NO: 5050 - DNA, 25 bp, synthetic construct
  source 1..25: mol_type = other DNA; mol_type = other DNA
gttgctgggaagagggaatcacagc

SEQ ID NO: 5051 - DNA, 25 bp, synthetic construct
  source 1..25: mol_type = other DNA; mol_type = other DNA
gttgcgtggaagagggaatcacagc

SEQ ID NO: 5052 - DNA, 25 bp, synthetic construct
  source 1..25: mol_type = other DNA; mol_type = other DNA
gttgcggtgaagagggaatcacagc

SEQ ID NO: 5053 - DNA, 25 bp, synthetic construct
  source 1..25: mol_type = other DNA; mol_type = other DNA
gttgcgggtaagagggaatcacagc

SEQ ID NO: 5054 - DNA, 25 bp, synthetic construct
  source 1..25: mol_type = other DNA; mol_type = other DNA
gttgcagggaagagagaatcacagc

SEQ ID NO: 5055 - DNA, 25 bp, synthetic construct
  source 1..25: mol_type = other DNA; mol_type = other DNA
gttgcgaggaagagagaatcacagc

SEQ ID NO: 5056 - DNA, 25 bp, synthetic construct
  source 1..25: mol_type = other DNA; mol_type = other DNA
gttgcggagaagagagaatcacagc

SEQ ID NO: 5057 - DNA, 25 bp, synthetic construct
  source 1..25: mol_type = other DNA; mol_type = other DNA
gttgcgggaaagagagaatcacagc

SEQ ID NO: 5058 - DNA, 25 bp, synthetic construct
  source 1..25: mol_type = other DNA; mol_type = other DNA
tgttgctgggaagagggaatcacag

SEQ ID NO: 5059 - DNA, 25 bp, synthetic construct
  source 1..25: mol_type = other DNA; mol_type = other DNA
tgttgcgtggaagagggaatcacag

SEQ ID NO: 5060 - DNA, 25 bp, synthetic construct
  source 1..25: mol_type = other DNA; mol_type = other DNA
tgttgcggtgaagagggaatcacag

SEQ ID NO: 5061 - DNA, 25 bp, synthetic construct
  source 1..25: mol_type = other DNA; mol_type = other DNA
tgttgcgggtaagagggaatcacag

SEQ ID NO: 5062 - DNA, 25 bp, synthetic construct
  source 1..25: mol_type = other DNA; mol_type = other DNA
tgttgcagagaagagggaatcacag

SEQ ID NO: 5063 - DNA, 25 bp, synthetic construct
  source 1..25: mol_type = other DNA; mol_type = other DNA
tgttgcagggaagagagaatcacag

SEQ ID NO: 5064 - DNA, 25 bp, synthetic construct
  source 1..25: mol_type = other DNA; mol_type = other DNA
tgttgcgaggaagaaggaatcacag

SEQ ID NO: 5065 - DNA, 25 bp, synthetic construct
  source 1..25: mol_type = other DNA; mol_type = other DNA
tgttgcgaggaagagagaatcacag

SEQ ID NO: 5066 - DNA, 25 bp, synthetic construct
  source 1..25: mol_type = other DNA; mol_type = other DNA
tgttgcggagaagaaggaatcacag

SEQ ID NO: 5067 - DNA, 25 bp, synthetic construct
  source 1..25: mol_type = other DNA; mol_type = other DNA
tgttgcggagaagagagaatcacag

SEQ ID NO: 5068 - DNA, 25 bp, synthetic construct
  source 1..25: mol_type = other DNA; mol_type = other DNA
tgttgcgggaaagaaggaatcacag

SEQ ID NO: 5069 - DNA, 25 bp, synthetic construct
  source 1..25: mol_type = other DNA; mol_type = other DNA
tgttgcgggaaagagagaatcacag

SEQ ID NO: 5070 - DNA, 25 bp, synthetic construct
  source 1..25: mol_type = other DNA; mol_type = other DNA
ctgttgctgggaagagggaatcaca

SEQ ID NO: 5071 - DNA, 25 bp, synthetic construct
  source 1..25: mol_type = other DNA; mol_type = other DNA
ctgttgcgtggaagagggaatcaca

SEQ ID NO: 5072 - DNA, 25 bp, synthetic construct
  source 1..25: mol_type = other DNA; mol_type = other DNA
ctgttgcggtgaagagggaatcaca

SEQ ID NO: 5073 - DNA, 25 bp, synthetic construct
  source 1..25: mol_type = other DNA; mol_type = other DNA
ctgttgcgggtaagagggaatcaca

SEQ ID NO: 5074 - DNA, 25 bp, synthetic construct
  source 1..25: mol_type = other DNA; mol_type = other DNA
ctgttacgaggaagagggaatcaca

SEQ ID NO: 5075 - DNA, 25 bp, synthetic construct
  source 1..25: mol_type = other DNA; mol_type = other DNA
ctgttgcagggaagagagaatcaca

SEQ ID NO: 5076 - DNA, 25 bp, synthetic construct
  source 1..25: mol_type = other DNA; mol_type = other DNA
ctgttgcgaggaagaaggaatcaca

SEQ ID NO: 5077 - DNA, 25 bp, synthetic construct
  source 1..25: mol_type = other DNA; mol_type = other DNA
ctgttgcgaggaagagagaatcaca

SEQ ID NO: 5078 - DNA, 25 bp, synthetic construct
  source 1..25: mol_type = other DNA; mol_type = other DNA
ctgttgcggagaagaaggaatcaca

SEQ ID NO: 5079 - DNA, 25 bp, synthetic construct
  source 1..25: mol_type = other DNA; mol_type = other DNA
ctgttgcggagaagagagaatcaca

SEQ ID NO: 5080 - DNA, 25 bp, synthetic construct
  source 1..25: mol_type = other DNA; mol_type = other DNA
ctgttgcggagaagaggaaatcaca

SEQ ID NO: 5081 - DNA, 25 bp, synthetic construct
  source 1..25: mol_type = other DNA; mol_type = other DNA
ctgttgcgggaaagagagaatcaca

SEQ ID NO: 5082 - DNA, 25 bp, synthetic construct
  source 1..25: mol_type = other DNA; mol_type = other DNA
cctgttgctgggaagagggaatcac

SEQ ID NO: 5083 - DNA, 25 bp, synthetic construct
  source 1..25: mol_type = other DNA; mol_type = other DNA
cctgttgcgtggaagagggaatcac

SEQ ID NO: 5084 - DNA, 25 bp, synthetic construct
  source 1..25: mol_type = other DNA; mol_type = other DNA
cctgttgcggtgaagagggaatcac

SEQ ID NO: 5085 - DNA, 25 bp, synthetic construct
  source 1..25: mol_type = other DNA; mol_type = other DNA
cctgttgcgggtaagagggaatcac

SEQ ID NO: 5086 - DNA, 25 bp, synthetic construct
  source 1..25: mol_type = other DNA; mol_type = other DNA
cctgttgcgaggaagaaggaatcac

SEQ ID NO: 5087 - DNA, 25 bp, synthetic construct
  source 1..25: mol_type = other DNA; mol_type = other DNA
cctgttgcgaggaagagagaatcac

SEQ ID NO: 5088 - DNA, 25 bp, synthetic construct
  source 1..25: mol_type = other DNA; mol_type = other DNA
cctgttgcgaggaagaggaaatcac

SEQ ID NO: 5089 - DNA, 25 bp, synthetic construct
  source 1..25: mol_type = other DNA; mol_type = other DNA
cctgttgcggagaagagagaatcac

SEQ ID NO: 5090 - DNA, 25 bp, synthetic construct
  source 1..25: mol_type = other DNA; mol_type = other DNA
tcctgttgctgggaagagggaatca

SEQ ID NO: 5091 - DNA, 25 bp, synthetic construct
  source 1..25: mol_type = other DNA; mol_type = other DNA
tcctgttgcgtggaagagggaatca

SEQ ID NO: 5092 - DNA, 25 bp, synthetic construct
  source 1..25: mol_type = other DNA; mol_type = other DNA
tcctgttgcggtgaagagggaatca

SEQ ID NO: 5093 - DNA, 25 bp, synthetic construct
  source 1..25: mol_type = other DNA; mol_type = other DNA
tcctgttgcgggtaagagggaatca

SEQ ID NO: 5094 - DNA, 25 bp, synthetic construct
  source 1..25: mol_type = other DNA; mol_type = other DNA
tcctgttgcgaggaagagagaatca

SEQ ID NO: 5095 - DNA, 25 bp, synthetic construct
  source 1..25: mol_type = other DNA; mol_type = other DNA
tcctgttgcgaggaagaggaaatca

SEQ ID NO: 5096 - DNA, 25 bp, synthetic construct
  source 1..25: mol_type = other DNA; mol_type = other DNA
tcctgttgcggagaagagagaatca

SEQ ID NO: 5097 - DNA, 25 bp, synthetic construct
  source 1..25: mol_type = other DNA; mol_type = other DNA
tcctgttgcggagaagaggaaatca

SEQ ID NO: 5098 - DNA, 25 bp, synthetic construct
  source 1..25: mol_type = other DNA; mol_type = other DNA
ctcctgttgcagggaagagggaatc

SEQ ID NO: 5099 - DNA, 25 bp, synthetic construct
  source 1..25: mol_type = other DNA; mol_type = other DNA
ctcctgttgcgaggaagagggaatc

SEQ ID NO: 5100 - DNA, 25 bp, synthetic construct
  source 1..25: mol_type = other DNA; mol_type = other DNA
ctcctgttgcggagaagagggaatc

SEQ ID NO: 5101 - DNA, 25 bp, synthetic construct
  source 1..25: mol_type = other DNA; mol_type = other DNA
ctcctgttgcgggaaagagggaatc

SEQ ID NO: 5102 - DNA, 25 bp, synthetic construct
  source 1..25: mol_type = other DNA; mol_type = other DNA
ctcctgttgcgaggaagaaggaatc

SEQ ID NO: 5103 - DNA, 25 bp, synthetic construct
  source 1..25: mol_type = other DNA; mol_type = other DNA
ctcctgttgcgaggaagagagaatc

SEQ ID NO: 5104 - DNA, 25 bp, synthetic construct
  source 1..25: mol_type = other DNA; mol_type = other DNA
tctcctgttgcagggaagagggaat

SEQ ID NO: 5105 - DNA, 25 bp, synthetic construct
  source 1..25: mol_type = other DNA; mol_type = other DNA
tctcctgttgcgaggaagagggaat

SEQ ID NO: 5106 - DNA, 25 bp, synthetic construct
  source 1..25: mol_type = other DNA; mol_type = other DNA
tctcctgttgcggagaagagggaat

SEQ ID NO: 5107 - DNA, 25 bp, synthetic construct
  source 1..25: mol_type = other DNA; mol_type = other DNA
tctcctgttgcgggaaagagggaat

SEQ ID NO: 5108 - DNA, 25 bp, synthetic construct
  source 1..25: mol_type = other DNA; mol_type = other DNA
tctcctgttgcgaggaagaaggaat

SEQ ID NO: 5109 - DNA, 25 bp, synthetic construct
  source 1..25: mol_type = other DNA; mol_type = other DNA
tctcctgttgcgaggaagagagaat

SEQ ID NO: 5110 - DNA, 25 bp, synthetic construct
  source 1..25: mol_type = other DNA; mol_type = other DNA
tctcctgttgcggagaagagagaat

SEQ ID NO: 5111 - DNA, 25 bp, synthetic construct
  source 1..25: mol_type = other DNA; mol_type = other DNA
tctcctgttgcggagaagaggaaat

SEQ ID NO: 5112 - DNA, 25 bp, synthetic construct
  source 1..25: mol_type = other DNA; mol_type = other DNA
ctctcctgttgcagggaagagggaa

SEQ ID NO: 5113 - DNA, 25 bp, synthetic construct
  source 1..25: mol_type = other DNA; mol_type = other DNA
ctctcctgttgcgaggaagagggaa

SEQ ID NO: 5114 - DNA, 25 bp, synthetic construct
  source 1..25: mol_type = other DNA; mol_type = other DNA
ctctcctgttgcggagaagagggaa

SEQ ID NO: 5115 - DNA, 25 bp, synthetic construct
  source 1..25: mol_type = other DNA; mol_type = other DNA
ctctcctgttgcgggaaagagggaa

SEQ ID NO: 5116 - DNA, 25 bp, synthetic construct
  source 1..25: mol_type = other DNA; mol_type = other DNA
ctctcctgttgcgaggaagaaggaa

SEQ ID NO: 5117 - DNA, 25 bp, synthetic construct
  source 1..25: mol_type = other DNA; mol_type = other DNA
ctctcctgttgcgaggaagagagaa

SEQ ID NO: 5118 - DNA, 25 bp, synthetic construct
  source 1..25: mol_type = other DNA; mol_type = other DNA
ctctcctgttgcggagaagaaggaa

SEQ ID NO: 5119 - DNA, 25 bp, synthetic construct
  source 1..25: mol_type = other DNA; mol_type = other DNA
ctctcctgttgcggagaagagagaa

SEQ ID NO: 5120 - DNA, 25 bp, synthetic construct
  source 1..25: mol_type = other DNA; mol_type = other DNA
gctctcctgttgcagggaagaggga

SEQ ID NO: 5121 - DNA, 25 bp, synthetic construct
  source 1..25: mol_type = other DNA; mol_type = other DNA
gctctcctgttgcgaggaagaggga

SEQ ID NO: 5122 - DNA, 25 bp, synthetic construct
  source 1..25: mol_type = other DNA; mol_type = other DNA
gctctcctgttgcggagaagaggga

SEQ ID NO: 5123 - DNA, 25 bp, synthetic construct
  source 1..25: mol_type = other DNA; mol_type = other DNA
gctctcctgttgcgggaaagaggga

SEQ ID NO: 5124 - DNA, 25 bp, synthetic construct
  source 1..25: mol_type = other DNA; mol_type = other DNA
gctctcctgttgcgaggaagaagga

SEQ ID NO: 5125 - DNA, 25 bp, synthetic construct
  source 1..25: mol_type = other DNA; mol_type = other DNA
gctctcctgttgcgaggaagagaga

SEQ ID NO: 5126 - DNA, 25 bp, synthetic construct
  source 1..25: mol_type = other DNA; mol_type = other DNA
gctctcctgttgcggagaagaagga

SEQ ID NO: 5127 - DNA, 25 bp, synthetic construct
  source 1..25: mol_type = other DNA; mol_type = other DNA
gctctcctgttgcggagaagagaga

SEQ ID NO: 5128 - DNA, 25 bp, synthetic construct
  source 1..25: mol_type = other DNA; mol_type = other DNA
agctctcctgttgcagggaagaggg

SEQ ID NO: 5129 - DNA, 25 bp, synthetic construct
  source 1..25: mol_type = other DNA; mol_type = other DNA
agctctcctgttgcgaggaagaggg

SEQ ID NO: 5130 - DNA, 25 bp, synthetic construct
  source 1..25: mol_type = other DNA; mol_type = other DNA
agctctcctgttgcggagaagaggg

SEQ ID NO: 5131 - DNA, 25 bp, synthetic construct
  source 1..25: mol_type = other DNA; mol_type = other DNA
agctctcctgttgcgggaaagaggg

SEQ ID NO: 5132 - DNA, 25 bp, synthetic construct
  source 1..25: mol_type = other DNA; mol_type = other DNA
agctctcctgttgcgaggaagaagg

SEQ ID NO: 5133 - DNA, 25 bp, synthetic construct
  source 1..25: mol_type = other DNA; mol_type = other DNA
agctctcctgttgcgaggaagagag

SEQ ID NO: 5134 - DNA, 25 bp, synthetic construct
  source 1..25: mol_type = other DNA; mol_type = other DNA
agctctcctgttgcggagaagaagg

SEQ ID NO: 5135 - DNA, 25 bp, synthetic construct
  source 1..25: mol_type = other DNA; mol_type = other DNA
agctctcctgttgcggagaagagag

SEQ ID NO: 5136 - DNA, 25 bp, synthetic construct
  source 1..25: mol_type = other DNA; mol_type = other DNA
cagctctcctgttgcagggaagagg

SEQ ID NO: 5137 - DNA, 25 bp, synthetic construct
  source 1..25: mol_type = other DNA; mol_type = other DNA
cagctctcctgttgcgaggaagagg

SEQ ID NO: 5138 - DNA, 25 bp, synthetic construct
  source 1..25: mol_type = other DNA; mol_type = other DNA
cagctctcctgttgcggagaagagg

SEQ ID NO: 5139 - DNA, 25 bp, synthetic construct
  source 1..25: mol_type = other DNA; mol_type = other DNA
cagctctcctgttgcgggaaagagg

SEQ ID NO: 5140 - DNA, 25 bp, synthetic construct
  source 1..25: mol_type = other DNA; mol_type = other DNA
cagctctcctgttgcgaagaagagg

SEQ ID NO: 5141 - DNA, 25 bp, synthetic construct
  source 1..25: mol_type = other DNA; mol_type = other DNA
cagctctcctgttgcgagaaagagg

SEQ ID NO: 5142 - DNA, 25 bp, synthetic construct
  source 1..25: mol_type = other DNA; mol_type = other DNA
cagctctcctgttgcgaggaagaga

SEQ ID NO: 5143 - DNA, 25 bp, synthetic construct
  source 1..25: mol_type = other DNA; mol_type = other DNA
cagctctcctgttgcggaaaagagg

SEQ ID NO: 5144 - DNA, 25 bp, synthetic construct
  source 1..25: mol_type = other DNA; mol_type = other DNA
acagctctcctgttgcagggaagag

SEQ ID NO: 5145 - DNA, 25 bp, synthetic construct
  source 1..25: mol_type = other DNA; mol_type = other DNA
acagctctcctgttgcgaggaagag

SEQ ID NO: 5146 - DNA, 25 bp, synthetic construct
  source 1..25: mol_type = other DNA; mol_type = other DNA
acagctctcctgttgcggagaagag

SEQ ID NO: 5147 - DNA, 25 bp, synthetic construct
  source 1..25: mol_type = other DNA; mol_type = other DNA
acagctctcctgttgcgggaaagag

SEQ ID NO: 5148 - DNA, 25 bp, synthetic construct
  source 1..25: mol_type = other DNA; mol_type = other DNA
acagctctcctgttgcagagaagag

SEQ ID NO: 5149 - DNA, 25 bp, synthetic construct
  source 1..25: mol_type = other DNA; mol_type = other DNA
acagctctcctgttgcgaagaagag

SEQ ID NO: 5150 - DNA, 25 bp, synthetic construct
  source 1..25: mol_type = other DNA; mol_type = other DNA
acagctctcctgttgcgagaaagag

SEQ ID NO: 5151 - DNA, 25 bp, synthetic construct
  source 1..25: mol_type = other DNA; mol_type = other DNA
acagctctcctgttgcggagaagaa

SEQ ID NO: 5152 - DNA, 25 bp, synthetic construct
  source 1..25: mol_type = other DNA; mol_type = other DNA
cacagctctcctgttgcagggaaga

SEQ ID NO: 5153 - DNA, 25 bp, synthetic construct
  source 1..25: mol_type = other DNA; mol_type = other DNA
cacagctctcctgttgcgaggaaga

SEQ ID NO: 5154 - DNA, 25 bp, synthetic construct
  source 1..25: mol_type = other DNA; mol_type = other DNA
cacagctctcctgttgcggagaaga

SEQ ID NO: 5155 - DNA, 25 bp, synthetic construct
  source 1..25: mol_type = other DNA; mol_type = other DNA
cacagctctcctgttgcgggaaaga

SEQ ID NO: 5156 - DNA, 25 bp, synthetic construct
  source 1..25: mol_type = other DNA; mol_type = other DNA
cacagctctcctgttgcgggaaaaa

SEQ ID NO: 5157 - DNA, 25 bp, synthetic construct
  source 1..25: mol_type = other DNA; mol_type = other DNA
gcacagctctcctgttgcagggaag

SEQ ID NO: 5158 - DNA, 25 bp, synthetic construct
  source 1..25: mol_type = other DNA; mol_type = other DNA
gcacagctctcctgttgcgaggaag

SEQ ID NO: 5159 - DNA, 25 bp, synthetic construct
  source 1..25: mol_type = other DNA; mol_type = other DNA
gcacagctctcctgttgcggagaag

SEQ ID NO: 5160 - DNA, 25 bp, synthetic construct
  source 1..25: mol_type = other DNA; mol_type = other DNA
gcacagctctcctgttgcgggaaag

SEQ ID NO: 5161 - DNA, 25 bp, synthetic construct
  source 1..25: mol_type = other DNA; mol_type = other DNA
gcacagctctcctgttgcgggaaaa

SEQ ID NO: 5162 - DNA, 25 bp, synthetic construct
  source 1..25: mol_type = other DNA; mol_type = other DNA
agcacagctctcctgttgcgggaaa

SEQ ID NO: 5163 - DNA, 25 bp, synthetic construct
  source 1..25: mol_type = other DNA; mol_type = other DNA
agcacagctctcctgttgcggaaaa

SEQ ID NO: 5164 - DNA, 25 bp, synthetic construct
  source 1..25: mol_type = other DNA; mol_type = other DNA
gagcacagctctcctgttgcgggaa

SEQ ID NO: 5165 - DNA, 25 bp, synthetic construct
  source 1..25: mol_type = other DNA; mol_type = other DNA
gagcacagctctcctgttgcggaaa

SEQ ID NO: 5166 - DNA, 25 bp, synthetic construct
  source 1..25: mol_type = other DNA; mol_type = other DNA
cgagcacagctctcctgttgcggga

SEQ ID NO: 5167 - DNA, 25 bp, synthetic construct
  source 1..25: mol_type = other DNA; mol_type = other DNA
cgagcacagctctcctgttgcggaa

SEQ ID NO: 5168 - DNA, 25 bp, synthetic construct
  source 1..25: mol_type = other DNA; mol_type = other DNA
acgagcacagctctcctgttgcggg

SEQ ID NO: 5169 - DNA, 25 bp, synthetic construct
  source 1..25: mol_type = other DNA; mol_type = other DNA
acgagcacagctctcctgttgcgga

SEQ ID NO: 5170 - DNA, 25 bp, synthetic construct
  source 1..25: mol_type = other DNA; mol_type = other DNA
acgagcacagctctcctgttgcgaa

SEQ ID NO: 5171 - DNA, 25 bp, synthetic construct
  source 1..25: mol_type = other DNA; mol_type = other DNA
cacgagcacagctctcctgttgcga

SEQ ID NO: 5172 - DNA, 25 bp, synthetic construct
  source 1..25: mol_type = other DNA; mol_type = other DNA
cacgagcacagctctcctgttgcaa

SEQ ID NO: 5173 - DNA, 25 bp, synthetic construct
  source 1..25: mol_type = other DNA; mol_type = other DNA
acacgagcacagctctcctgttgcg

SEQ ID NO: 5174 - DNA, 25 bp, synthetic construct
  source 1..25: mol_type = other DNA; mol_type = other DNA
acacgagcacagctctcctgttgca

SEQ ID NO: 5175 - DNA, 25 bp, synthetic construct
  source 1..25: mol_type = other DNA; mol_type = other DNA
acacgagcacagctctcctgttaca

SEQ ID NO: 5176 - DNA, 25 bp, synthetic construct
  source 1..25: mol_type = other DNA; mol_type = other DNA
gacacgagcacagctctcctgttgc

SEQ ID NO: 5177 - DNA, 25 bp, synthetic construct
  source 1..25: mol_type = other DNA; mol_type = other DNA
gacacgagcacagctctcctgttac

SEQ ID NO: 5178 - DNA, 25 bp, synthetic construct
  source 1..25: mol_type = other DNA; mol_type = other DNA
gacacgagcacagctctcctattac

SEQ ID NO: 5179 - DNA, 25 bp, synthetic construct
  source 1..25: mol_type = other DNA; mol_type = other DNA
ggacacgagcacagctctcctgtta

SEQ ID NO: 5180 - DNA, 25 bp, synthetic construct
  source 1..25: mol_type = other DNA; mol_type = other DNA
ggacacgagcacagctctcctatta

SEQ ID NO: 5181 - DNA, 25 bp, synthetic construct
  source 1..25: mol_type = other DNA; mol_type = other DNA
aggacacgagcacagctctcctgtt

SEQ ID NO: 5182 - DNA, 25 bp, synthetic construct
  source 1..25: mol_type = other DNA; mol_type = other DNA
aggacacgagcacagctctcctatt

SEQ ID NO: 5183 - DNA, 25 bp, synthetic construct
  source 1..25: mol_type = other DNA; mol_type = other DNA
aggacacgagcacaactctcctatt

SEQ ID NO: 5184 - DNA, 25 bp, synthetic construct
  source 1..25: mol_type = other DNA; mol_type = other DNA
caggacacgagcacagctctcctgt

SEQ ID NO: 5185 - DNA, 25 bp, synthetic construct
  source 1..25: mol_type = other DNA; mol_type = other DNA
caggacacgagcacagctctcctat

SEQ ID NO: 5186 - DNA, 25 bp, synthetic construct
  source 1..25: mol_type = other DNA; mol_type = other DNA
caggacacgagcacaactctcctat

SEQ ID NO: 5187 - DNA, 25 bp, synthetic construct
  source 1..25: mol_type = other DNA; mol_type = other DNA
gcaggacacgagcacagctctccta

SEQ ID NO: 5188 - DNA, 25 bp, synthetic construct
  source 1..25: mol_type = other DNA; mol_type = other DNA
gcaggacacgagcacaactctccta

SEQ ID NO: 5189 - DNA, 25 bp, synthetic construct
  source 1..25: mol_type = other DNA; mol_type = other DNA
agcaggacacgagcacagctctcct

SEQ ID NO: 5190 - DNA, 25 bp, synthetic construct
  source 1..25: mol_type = other DNA; mol_type = other DNA
agcaggacacgagcacaactctcct

SEQ ID NO: 5191 - DNA, 25 bp, synthetic construct
  source 1..25: mol_type = other DNA; mol_type = other DNA
agcaggacacgaacacaactctcct

SEQ ID NO: 5192 - DNA, 25 bp, synthetic construct
  source 1..25: mol_type = other DNA; mol_type = other DNA
gagcaggacacgagcacagctctcc

SEQ ID NO: 5193 - DNA, 25 bp, synthetic construct
  source 1..25: mol_type = other DNA; mol_type = other DNA
gagcaggacacgagcacaactctcc

SEQ ID NO: 5194 - DNA, 25 bp, synthetic construct
  source 1..25: mol_type = other DNA; mol_type = other DNA
gagcaggacacgaacacaactctcc

SEQ ID NO: 5195 - DNA, 25 bp, synthetic construct
  source 1..25: mol_type = other DNA; mol_type = other DNA
agagcaggacacgagcacaactctc

SEQ ID NO: 5196 - DNA, 25 bp, synthetic construct
  source 1..25: mol_type = other DNA; mol_type = other DNA
agagcaggacacgaacacaactctc

SEQ ID NO: 5197 - DNA, 25 bp, synthetic construct
  source 1..25: mol_type = other DNA; mol_type = other DNA
aagagcaggacacgagcacagctct

SEQ ID NO: 5198 - DNA, 25 bp, synthetic construct
  source 1..25: mol_type = other DNA; mol_type = other DNA
aagagcaggacacgagcacaactct

SEQ ID NO: 5199 - DNA, 25 bp, synthetic construct
  source 1..25: mol_type = other DNA; mol_type = other DNA
aagagcaggacacgaacacaactct

SEQ ID NO: 5200 - DNA, 25 bp, synthetic construct
  source 1..25: mol_type = other DNA; mol_type = other DNA
gaagagcaggacacgagcacagctc

SEQ ID NO: 5201 - DNA, 25 bp, synthetic construct
  source 1..25: mol_type = other DNA; mol_type = other DNA
gaagagcaggacacgagcacaactc

SEQ ID NO: 5202 - DNA, 25 bp, synthetic construct
  source 1..25: mol_type = other DNA; mol_type = other DNA
gaagagcaggacacgaacacaactc

SEQ ID NO: 5203 - DNA, 25 bp, synthetic construct
  source 1..25: mol_type = other DNA; mol_type = other DNA
ggaagagcaggacacgagcacaact

SEQ ID NO: 5204 - DNA, 25 bp, synthetic construct
  source 1..25: mol_type = other DNA; mol_type = other DNA
ggaagagcaggacacgaacacaact

SEQ ID NO: 5205 - DNA, 25 bp, synthetic construct
  source 1..25: mol_type = other DNA; mol_type = other DNA
cggaagagcaggacacgagcacagc

SEQ ID NO: 5206 - DNA, 25 bp, synthetic construct
  source 1..25: mol_type = other DNA; mol_type = other DNA
cggaagagcaggacacgagcacaac

SEQ ID NO: 5207 - DNA, 25 bp, synthetic construct
  source 1..25: mol_type = other DNA; mol_type = other DNA
cggaagagcaggacacgaacacaac

SEQ ID NO: 5208 - DNA, 25 bp, synthetic construct
  source 1..25: mol_type = other DNA; mol_type = other DNA
acggaagagcaggacacgagcacag

SEQ ID NO: 5209 - DNA, 25 bp, synthetic construct
  source 1..25: mol_type = other DNA; mol_type = other DNA
acggaagagcaggacacgagcacaa

SEQ ID NO: 5210 - DNA, 25 bp, synthetic construct
  source 1..25: mol_type = other DNA; mol_type = other DNA
acggaagagcaggacacgaacacaa

SEQ ID NO: 5211 - DNA, 25 bp, synthetic construct
  source 1..25: mol_type = other DNA; mol_type = other DNA
cacggaagagcaggacacgaacaca

SEQ ID NO: 5212 - DNA, 25 bp, synthetic construct
  source 1..25: mol_type = other DNA; mol_type = other DNA
cacggaagagcaggacacaaacaca

SEQ ID NO: 5213 - DNA, 25 bp, synthetic construct
  source 1..25: mol_type = other DNA; mol_type = other DNA
ccacggaagagcaggacacgagcac

SEQ ID NO: 5214 - DNA, 25 bp, synthetic construct
  source 1..25: mol_type = other DNA; mol_type = other DNA
ccacggaagagcaggacacgaacac

SEQ ID NO: 5215 - DNA, 25 bp, synthetic construct
  source 1..25: mol_type = other DNA; mol_type = other DNA
ccacggaagagcaggacacaaacac

SEQ ID NO: 5216 - DNA, 25 bp, synthetic construct
  source 1..25: mol_type = other DNA; mol_type = other DNA
tccacggaagagcaggacacgagca

SEQ ID NO: 5217 - DNA, 25 bp, synthetic construct
  source 1..25: mol_type = other DNA; mol_type = other DNA
tccacggaagagcaggacacgaaca

SEQ ID NO: 5218 - DNA, 25 bp, synthetic construct
  source 1..25: mol_type = other DNA; mol_type = other DNA
tccacggaagagcaggacacaaaca

SEQ ID NO: 5219 - DNA, 25 bp, synthetic construct
  source 1..25: mol_type = other DNA; mol_type = other DNA
ctccacggaagagcaggacacgaac

SEQ ID NO: 5220 - DNA, 25 bp, synthetic construct
  source 1..25: mol_type = other DNA; mol_type = other DNA
ctccacggaagagcaggacacaaac

SEQ ID NO: 5221 - DNA, 25 bp, synthetic construct
  source 1..25: mol_type = other DNA; mol_type = other DNA
gctccacggaagagcaggacacgag

SEQ ID NO: 5222 - DNA, 25 bp, synthetic construct
  source 1..25: mol_type = other DNA; mol_type = other DNA
gctccacggaagagcaggacacgaa

SEQ ID NO: 5223 - DNA, 25 bp, synthetic construct
  source 1..25: mol_type = other DNA; mol_type = other DNA
gctccacggaagagcaggacacaaa

SEQ ID NO: 5224 - DNA, 25 bp, synthetic construct
  source 1..25: mol_type = other DNA; mol_type = other DNA
agctccacggaagagcaggacacga

SEQ ID NO: 5225 - DNA, 25 bp, synthetic construct
  source 1..25: mol_type = other DNA; mol_type = other DNA
agctccacggaagagcaggacacaa

SEQ ID NO: 5226 - DNA, 25 bp, synthetic construct
  source 1..25: mol_type = other DNA; mol_type = other DNA
agctccacggaagagcagaacacaa

SEQ ID NO: 5227 - DNA, 25 bp, synthetic construct
  source 1..25: mol_type = other DNA; mol_type = other DNA
tagctccacggaagagcaggacaca

SEQ ID NO: 5228 - DNA, 25 bp, synthetic construct
  source 1..25: mol_type = other DNA; mol_type = other DNA
tagctccacggaagagcagaacaca

SEQ ID NO: 5229 - DNA, 25 bp, synthetic construct
  source 1..25: mol_type = other DNA; mol_type = other DNA
ttagctccacggaagagcaggacac

SEQ ID NO: 5230 - DNA, 25 bp, synthetic construct
  source 1..25: mol_type = other DNA; mol_type = other DNA
ttagctccacggaagagcagaacac

SEQ ID NO: 5231 - DNA, 25 bp, synthetic construct
  source 1..25: mol_type = other DNA; mol_type = other DNA
ttagctccacggaagagcaaaacac

SEQ ID NO: 5232 - DNA, 25 bp, synthetic construct
  source 1..25: mol_type = other DNA; mol_type = other DNA
gttagctccacggaagagcaggaca

SEQ ID NO: 5233 - DNA, 25 bp, synthetic construct
  source 1..25: mol_type = other DNA; mol_type = other DNA
gttagctccacggaagagcagaaca

SEQ ID NO: 5234 - DNA, 25 bp, synthetic construct
  source 1..25: mol_type = other DNA; mol_type = other DNA
gttagctccacggaagagcaaaaca

SEQ ID NO: 5235 - DNA, 25 bp, synthetic construct
  source 1..25: mol_type = other DNA; mol_type = other DNA
tgttagctccacggaagagcagaac

SEQ ID NO: 5236 - DNA, 25 bp, synthetic construct
  source 1..25: mol_type = other DNA; mol_type = other DNA
tgttagctccacggaagagcaaaac

SEQ ID NO: 5237 - DNA, 25 bp, synthetic construct
  source 1..25: mol_type = other DNA; mol_type = other DNA
ctgttagctccacggaagagcagga

SEQ ID NO: 5238 - DNA, 25 bp, synthetic construct
  source 1..25: mol_type = other DNA; mol_type = other DNA
ctgttagctccacggaagagcagaa

SEQ ID NO: 5239 - DNA, 25 bp, synthetic construct
  source 1..25: mol_type = other DNA; mol_type = other DNA
ctgttagctccacggaagagcaaaa

SEQ ID NO: 5240 - DNA, 25 bp, synthetic construct
  source 1..25: mol_type = other DNA; mol_type = other DNA
cctgttagctccacggaagagcagg

SEQ ID NO: 5241 - DNA, 25 bp, synthetic construct
  source 1..25: mol_type = other DNA; mol_type = other DNA
cctgttagctccacggaagagcaga

SEQ ID NO: 5242 - DNA, 25 bp, synthetic construct
  source 1..25: mol_type = other DNA; mol_type = other DNA
cctgttagctccacggaagagcaaa

SEQ ID NO: 5243 - DNA, 25 bp, synthetic construct
  source 1..25: mol_type = other DNA; mol_type = other DNA
ccctgttagctccacggaagagcaa

SEQ ID NO: 5244 - DNA, 25 bp, synthetic construct
  source 1..25: mol_type = other DNA; mol_type = other DNA
ccctgttagctccacggaagaacaa

SEQ ID NO: 5245 - DNA, 25 bp, synthetic construct
  source 1..25: mol_type = other DNA; mol_type = other DNA
tccctgttagctccacggaagagca

SEQ ID NO: 5246 - DNA, 25 bp, synthetic construct
  source 1..25: mol_type = other DNA; mol_type = other DNA
tccctgttagctccacggaagaaca

SEQ ID NO: 5247 - DNA, 25 bp, synthetic construct
  source 1..25: mol_type = other DNA; mol_type = other DNA
tccctgttagctccacggaaaaaca

SEQ ID NO: 5248 - DNA, 25 bp, synthetic construct
  source 1..25: mol_type = other DNA; mol_type = other DNA
atccctgttagctccacggaagagc

SEQ ID NO: 5249 - DNA, 25 bp, synthetic construct
  source 1..25: mol_type = other DNA; mol_type = other DNA
atccctgttagctccacggaagaac

SEQ ID NO: 5250 - DNA, 25 bp, synthetic construct
  source 1..25: mol_type = other DNA; mol_type = other DNA
atccctgttagctccacggaaaaac

SEQ ID NO: 5251 - DNA, 25 bp, synthetic construct
  source 1..25: mol_type = other DNA; mol_type = other DNA
catccctgttagctccacggaagaa

SEQ ID NO: 5252 - DNA, 25 bp, synthetic construct
  source 1..25: mol_type = other DNA; mol_type = other DNA
catccctgttagctccacggaaaaa

SEQ ID NO: 5253 - DNA, 25 bp, synthetic construct
  source 1..25: mol_type = other DNA; mol_type = other DNA
acatccctgttagctccacggaaga

SEQ ID NO: 5254 - DNA, 25 bp, synthetic construct
  source 1..25: mol_type = other DNA; mol_type = other DNA
acatccctgttagctccacggaaaa

SEQ ID NO: 5255 - DNA, 25 bp, synthetic construct
  source 1..25: mol_type = other DNA; mol_type = other DNA
acatccctgttagctccacgaaaaa

SEQ ID NO: 5256 - DNA, 25 bp, synthetic construct
  source 1..25: mol_type = other DNA; mol_type = other DNA
gacatccctgttagctccacggaag

SEQ ID NO: 5257 - DNA, 25 bp, synthetic construct
  source 1..25: mol_type = other DNA; mol_type = other DNA
gacatccctgttagctccacggaaa

SEQ ID NO: 5258 - DNA, 25 bp, synthetic construct
  source 1..25: mol_type = other DNA; mol_type = other DNA
gacatccctgttagctccacgaaaa

SEQ ID NO: 5259 - DNA, 25 bp, synthetic construct
  source 1..25: mol_type = other DNA; mol_type = other DNA
ggacatccctgttagctccacgaaa

SEQ ID NO: 5260 - DNA, 25 bp, synthetic construct
  source 1..25: mol_type = other DNA; mol_type = other DNA
ggacatccctgttagctccacaaaa

SEQ ID NO: 5261 - DNA, 25 bp, synthetic construct
  source 1..25: mol_type = other DNA; mol_type = other DNA
cggacatccctgttagctccacgga

SEQ ID NO: 5262 - DNA, 25 bp, synthetic construct
  source 1..25: mol_type = other DNA; mol_type = other DNA
cggacatccctgttagctccacgaa

SEQ ID NO: 5263 - DNA, 25 bp, synthetic construct
  source 1..25: mol_type = other DNA; mol_type = other DNA
cggacatccctgttagctccacaaa

SEQ ID NO: 5264 - DNA, 25 bp, synthetic construct
  source 1..25: mol_type = other DNA; mol_type = other DNA
gcggacatccctgttagctccacgg

SEQ ID NO: 5265 - DNA, 25 bp, synthetic construct
  source 1..25: mol_type = other DNA; mol_type = other DNA
gcggacatccctgttagctccacga

SEQ ID NO: 5266 - DNA, 25 bp, synthetic construct
  source 1..25: mol_type = other DNA; mol_type = other DNA
gcggacatccctgttagctccacaa

SEQ ID NO: 5267 - DNA, 25 bp, synthetic construct
  source 1..25: mol_type = other DNA; mol_type = other DNA
tgcggacatccctgttagctccaca

SEQ ID NO: 5268 - DNA, 25 bp, synthetic construct
  source 1..25: mol_type = other DNA; mol_type = other DNA
tgcggacatccctgttaactccaca

SEQ ID NO: 5269 - DNA, 25 bp, synthetic construct
  source 1..25: mol_type = other DNA; mol_type = other DNA
ttgcggacatccctgttagctccac

SEQ ID NO: 5270 - DNA, 25 bp, synthetic construct
  source 1..25: mol_type = other DNA; mol_type = other DNA
ttgcggacatccctgttaactccac

SEQ ID NO: 5271 - DNA, 25 bp, synthetic construct
  source 1..25: mol_type = other DNA; mol_type = other DNA
ttgcggacatccctattaactccac

SEQ ID NO: 5272 - DNA, 25 bp, synthetic construct
  source 1..25: mol_type = other DNA; mol_type = other DNA
gttgcggacatccctgttagctcca

SEQ ID NO: 5273 - DNA, 25 bp, synthetic construct
  source 1..25: mol_type = other DNA; mol_type = other DNA
gttgcggacatccctgttaactcca

SEQ ID NO: 5274 - DNA, 25 bp, synthetic construct
  source 1..25: mol_type = other DNA; mol_type = other DNA
gttgcggacatccctattaactcca

SEQ ID NO: 5275 - DNA, 25 bp, synthetic construct
  source 1..25: mol_type = other DNA; mol_type = other DNA
agttgcggacatccctgttaactcc

SEQ ID NO: 5276 - DNA, 25 bp, synthetic construct
  source 1..25: mol_type = other DNA; mol_type = other DNA
agttgcggacatccctattaactcc

SEQ ID NO: 5277 - DNA, 25 bp, synthetic construct
  source 1..25: mol_type = other DNA; mol_type = other DNA
tagttgcggacatccctgttagctc

SEQ ID NO: 5278 - DNA, 25 bp, synthetic construct
  source 1..25: mol_type = other DNA; mol_type = other DNA
tagttgcggacatccctgttaactc

SEQ ID NO: 5279 - DNA, 25 bp, synthetic construct
  source 1..25: mol_type = other DNA; mol_type = other DNA
tagttgcggacatccctattaactc

SEQ ID NO: 5280 - DNA, 25 bp, synthetic construct
  source 1..25: mol_type = other DNA; mol_type = other DNA
gtagttgcggacatccctgttagct

SEQ ID NO: 5281 - DNA, 25 bp, synthetic construct
  source 1..25: mol_type = other DNA; mol_type = other DNA
gtagttgcggacatccctgttaact

SEQ ID NO: 5282 - DNA, 25 bp, synthetic construct
  source 1..25: mol_type = other DNA; mol_type = other DNA
gtagttgcggacatccctattaact

SEQ ID NO: 5283 - DNA, 25 bp, synthetic construct
  source 1..25: mol_type = other DNA; mol_type = other DNA
tgtagttgcggacatccctgttaac

SEQ ID NO: 5284 - DNA, 25 bp, synthetic construct
  source 1..25: mol_type = other DNA; mol_type = other DNA
tgtagttgcggacatccctattaac

SEQ ID NO: 5285 - DNA, 25 bp, synthetic construct
  source 1..25: mol_type = other DNA; mol_type = other DNA
ttgtagttgcggacatccctgttag

SEQ ID NO: 5286 - DNA, 25 bp, synthetic construct
  source 1..25: mol_type = other DNA; mol_type = other DNA
ttgtagttgcggacatccctgttaa

SEQ ID NO: 5287 - DNA, 25 bp, synthetic construct
  source 1..25: mol_type = other DNA; mol_type = other DNA
ttgtagttgcggacatccctattaa

SEQ ID NO: 5288 - DNA, 25 bp, synthetic construct
  source 1..25: mol_type = other DNA; mol_type = other DNA
gttgtagttgcggacatccctgtta

SEQ ID NO: 5289 - DNA, 25 bp, synthetic construct
  source 1..25: mol_type = other DNA; mol_type = other DNA
gttgtagttgcggacatccctatta

SEQ ID NO: 5290 - DNA, 25 bp, synthetic construct
  source 1..25: mol_type = other DNA; mol_type = other DNA
gttgtagttgcgaacatccctatta

SEQ ID NO: 5291 - DNA, 25 bp, synthetic construct
  source 1..25: mol_type = other DNA; mol_type = other DNA
tgttgtagttgcggacatccctatt

SEQ ID NO: 5292 - DNA, 25 bp, synthetic construct
  source 1..25: mol_type = other DNA; mol_type = other DNA
tgttgtagttgcgaacatccctatt

SEQ ID NO: 5293 - DNA, 25 bp, synthetic construct
  source 1..25: mol_type = other DNA; mol_type = other DNA
ctgttgtagttgcggacatccctgt

SEQ ID NO: 5294 - DNA, 25 bp, synthetic construct
  source 1..25: mol_type = other DNA; mol_type = other DNA
ctgttgtagttgcggacatccctat

SEQ ID NO: 5295 - DNA, 25 bp, synthetic construct
  source 1..25: mol_type = other DNA; mol_type = other DNA
ctgttgtagttgcgaacatccctat

SEQ ID NO: 5296 - DNA, 25 bp, synthetic construct
  source 1..25: mol_type = other DNA; mol_type = other DNA
gctgttgtagttgcggacatccctg

SEQ ID NO: 5297 - DNA, 25 bp, synthetic construct
  source 1..25: mol_type = other DNA; mol_type = other DNA
gctgttgtagttgcggacatcccta

SEQ ID NO: 5298 - DNA, 25 bp, synthetic construct
  source 1..25: mol_type = other DNA; mol_type = other DNA
gctgttgtagttgcgaacatcccta

SEQ ID NO: 5299 - DNA, 25 bp, synthetic construct
  source 1..25: mol_type = other DNA; mol_type = other DNA
ggctgttgtagttgcgaacatccct

SEQ ID NO: 5300 - DNA, 25 bp, synthetic construct
  source 1..25: mol_type = other DNA; mol_type = other DNA
ggctgttgtagttgcaaacatccct

SEQ ID NO: 5301 - DNA, 25 bp, synthetic construct
  source 1..25: mol_type = other DNA; mol_type = other DNA
tggctgttgtagttgcggacatccc

SEQ ID NO: 5302 - DNA, 25 bp, synthetic construct
  source 1..25: mol_type = other DNA; mol_type = other DNA
tggctgttgtagttgcgaacatccc

SEQ ID NO: 5303 - DNA, 25 bp, synthetic construct
  source 1..25: mol_type = other DNA; mol_type = other DNA
tggctgttgtagttgcaaacatccc

SEQ ID NO: 5304 - DNA, 25 bp, synthetic construct
  source 1..25: mol_type = other DNA; mol_type = other DNA
ctggctgttgtagttgcggacatcc

SEQ ID NO: 5305 - DNA, 25 bp, synthetic construct
  source 1..25: mol_type = other DNA; mol_type = other DNA
ctggctgttgtagttgcgaacatcc

SEQ ID NO: 5306 - DNA, 25 bp, synthetic construct
  source 1..25: mol_type = other DNA; mol_type = other DNA
ctggctgttgtagttgcaaacatcc

SEQ ID NO: 5307 - DNA, 25 bp, synthetic construct
  source 1..25: mol_type = other DNA; mol_type = other DNA
tctggctgttgtagttgcgaacatc

SEQ ID NO: 5308 - DNA, 25 bp, synthetic construct
  source 1..25: mol_type = other DNA; mol_type = other DNA
tctggctgttgtagttgcaaacatc

SEQ ID NO: 5309 - DNA, 25 bp, synthetic construct
  source 1..25: mol_type = other DNA; mol_type = other DNA
gtctggctgttgtagttgcggacat

SEQ ID NO: 5310 - DNA, 25 bp, synthetic construct
  source 1..25: mol_type = other DNA; mol_type = other DNA
gtctggctgttgtagttgcgaacat

SEQ ID NO: 5311 - DNA, 25 bp, synthetic construct
  source 1..25: mol_type = other DNA; mol_type = other DNA
gtctggctgttgtagttgcaaacat

SEQ ID NO: 5312 - DNA, 25 bp, synthetic construct
  source 1..25: mol_type = other DNA; mol_type = other DNA
tgtctggctgttgtagttgcggaca

SEQ ID NO: 5313 - DNA, 25 bp, synthetic construct
  source 1..25: mol_type = other DNA; mol_type = other DNA
tgtctggctgttgtagttgcgaaca

SEQ ID NO: 5314 - DNA, 25 bp, synthetic construct
  source 1..25: mol_type = other DNA; mol_type = other DNA
tgtctggctgttgtagttgcaaaca

SEQ ID NO: 5315 - DNA, 25 bp, synthetic construct
  source 1..25: mol_type = other DNA; mol_type = other DNA
ctgtctggctgttgtagttgcgaac

SEQ ID NO: 5316 - DNA, 25 bp, synthetic construct
  source 1..25: mol_type = other DNA; mol_type = other DNA
ctgtctggctgttgtagttgcaaac

SEQ ID NO: 5317 - DNA, 25 bp, synthetic construct
  source 1..25: mol_type = other DNA; mol_type = other DNA
gctgtctggctgttgtagttgcgga

SEQ ID NO: 5318 - DNA, 25 bp, synthetic construct
  source 1..25: mol_type = other DNA; mol_type = other DNA
gctgtctggctgttgtagttgcgaa

SEQ ID NO: 5319 - DNA, 25 bp, synthetic construct
  source 1..25: mol_type = other DNA; mol_type = other DNA
gctgtctggctgttgtagttgcaaa

SEQ ID NO: 5320 - DNA, 25 bp, synthetic construct
  source 1..25: mol_type = other DNA; mol_type = other DNA
ggctgtctggctgttgtagttgcgg

SEQ ID NO: 5321 - DNA, 25 bp, synthetic construct
  source 1..25: mol_type = other DNA; mol_type = other DNA
ggctgtctggctgttgtagttgcga

SEQ ID NO: 5322 - DNA, 25 bp, synthetic construct
  source 1..25: mol_type = other DNA; mol_type = other DNA
ggctgtctggctgttgtagttgcaa

SEQ ID NO: 5323 - DNA, 25 bp, synthetic construct
  source 1..25: mol_type = other DNA; mol_type = other DNA
aggctgtctggctgttgtagttgca

SEQ ID NO: 5324 - DNA, 25 bp, synthetic construct
  source 1..25: mol_type = other DNA; mol_type = other DNA
aggctgtctggctgttgtagttaca

SEQ ID NO: 5325 - DNA, 25 bp, synthetic construct
  source 1..25: mol_type = other DNA; mol_type = other DNA
aaggctgtctggctgttgtagttgc

SEQ ID NO: 5326 - DNA, 25 bp, synthetic construct
  source 1..25: mol_type = other DNA; mol_type = other DNA
aaggctgtctggctgttgtagttac

SEQ ID NO: 5327 - DNA, 25 bp, synthetic construct
  source 1..25: mol_type = other DNA; mol_type = other DNA
aaggctgtctggctgttgtaattac

SEQ ID NO: 5328 - DNA, 25 bp, synthetic construct
  source 1..25: mol_type = other DNA; mol_type = other DNA
gaaggctgtctggctgttgtagttg

SEQ ID NO: 5329 - DNA, 25 bp, synthetic construct
  source 1..25: mol_type = other DNA; mol_type = other DNA
gaaggctgtctggctgttgtagtta

SEQ ID NO: 5330 - DNA, 25 bp, synthetic construct
  source 1..25: mol_type = other DNA; mol_type = other DNA
gaaggctgtctggctgttgtaatta

SEQ ID NO: 5331 - DNA, 25 bp, synthetic construct
  source 1..25: mol_type = other DNA; mol_type = other DNA
ggaaggctgtctggctgttgtaatt

SEQ ID NO: 5332 - DNA, 25 bp, synthetic construct
  source 1..25: mol_type = other DNA; mol_type = other DNA
ggaaggctgtctggctgttataatt

SEQ ID NO: 5333 - DNA, 25 bp, synthetic construct
  source 1..25: mol_type = other DNA; mol_type = other DNA
tggaaggctgtctggctgttgtagt

SEQ ID NO: 5334 - DNA, 25 bp, synthetic construct
  source 1..25: mol_type = other DNA; mol_type = other DNA
tggaaggctgtctggctgttgtaat

SEQ ID NO: 5335 - DNA, 25 bp, synthetic construct
  source 1..25: mol_type = other DNA; mol_type = other DNA
tggaaggctgtctggctgttataat

SEQ ID NO: 5336 - DNA, 25 bp, synthetic construct
  source 1..25: mol_type = other DNA; mol_type = other DNA
ctggaaggctgtctggctgttgtag

SEQ ID NO: 5337 - DNA, 25 bp, synthetic construct
  source 1..25: mol_type = other DNA; mol_type = other DNA
ctggaaggctgtctggctgttgtaa

SEQ ID NO: 5338 - DNA, 25 bp, synthetic construct
  source 1..25: mol_type = other DNA; mol_type = other DNA
ctggaaggctgtctggctgttataa

SEQ ID NO: 5339 - DNA, 25 bp, synthetic construct
  source 1..25: mol_type = other DNA; mol_type = other DNA
cctggaaggctgtctggctgttata

SEQ ID NO: 5340 - DNA, 25 bp, synthetic construct
  source 1..25: mol_type = other DNA; mol_type = other DNA
cctggaaggctgtctggctattata

SEQ ID NO: 5341 - DNA, 25 bp, synthetic construct
  source 1..25: mol_type = other DNA; mol_type = other DNA
acctggaaggctgtctggctgttgt

SEQ ID NO: 5342 - DNA, 25 bp, synthetic construct
  source 1..25: mol_type = other DNA; mol_type = other DNA
acctggaaggctgtctggctgttat

SEQ ID NO: 5343 - DNA, 25 bp, synthetic construct
  source 1..25: mol_type = other DNA; mol_type = other DNA
acctggaaggctgtctggctattat

SEQ ID NO: 5344 - DNA, 25 bp, synthetic construct
  source 1..25: mol_type = other DNA; mol_type = other DNA
tacctggaaggctgtctggctgttg

SEQ ID NO: 5345 - DNA, 25 bp, synthetic construct
  source 1..25: mol_type = other DNA; mol_type = other DNA
tacctggaaggctgtctggctgtta

SEQ ID NO: 5346 - DNA, 25 bp, synthetic construct
  source 1..25: mol_type = other DNA; mol_type = other DNA
tacctggaaggctgtctggctatta

SEQ ID NO: 5347 - DNA, 25 bp, synthetic construct
  source 1..25: mol_type = other DNA; mol_type = other DNA
gtacctggaaggctgtctggctatt

SEQ ID NO: 5348 - DNA, 25 bp, synthetic construct
  source 1..25: mol_type = other DNA; mol_type = other DNA
gtacctggaaggctgtctgactatt

SEQ ID NO: 5349 - DNA, 25 bp, synthetic construct
  source 1..25: mol_type = other DNA; mol_type = other DNA
tgtacctggaaggctgtctggctgt

SEQ ID NO: 5350 - DNA, 25 bp, synthetic construct
  source 1..25: mol_type = other DNA; mol_type = other DNA
tgtacctggaaggctgtctggctat

SEQ ID NO: 5351 - DNA, 25 bp, synthetic construct
  source 1..25: mol_type = other DNA; mol_type = other DNA
tgtacctggaaggctgtctgactat

SEQ ID NO: 5352 - DNA, 25 bp, synthetic construct
  source 1..25: mol_type = other DNA; mol_type = other DNA
gtgtacctggaaggctgtctggctg

SEQ ID NO: 5353 - DNA, 25 bp, synthetic construct
  source 1..25: mol_type = other DNA; mol_type = other DNA
gtgtacctggaaggctgtctggcta

SEQ ID NO: 5354 - DNA, 25 bp, synthetic construct
  source 1..25: mol_type = other DNA; mol_type = other DNA
gtgtacctggaaggctgtctgacta

SEQ ID NO: 5355 - DNA, 25 bp, synthetic construct
  source 1..25: mol_type = other DNA; mol_type = other DNA
ggtgtacctggaaggctgtctgact

SEQ ID NO: 5356 - DNA, 25 bp, synthetic construct
  source 1..25: mol_type = other DNA; mol_type = other DNA
ggtgtacctggaaggctgtctaact

SEQ ID NO: 5357 - DNA, 25 bp, synthetic construct
  source 1..25: mol_type = other DNA; mol_type = other DNA
cggtgtacctggaaggctgtctggc

SEQ ID NO: 5358 - DNA, 25 bp, synthetic construct
  source 1..25: mol_type = other DNA; mol_type = other DNA
cggtgtacctggaaggctgtctgac

SEQ ID NO: 5359 - DNA, 25 bp, synthetic construct
  source 1..25: mol_type = other DNA; mol_type = other DNA
cggtgtacctggaaggctgtctaac

SEQ ID NO: 5360 - DNA, 25 bp, synthetic construct
  source 1..25: mol_type = other DNA; mol_type = other DNA
ccggtgtacctggaaggctgtctgg

SEQ ID NO: 5361 - DNA, 25 bp, synthetic construct
  source 1..25: mol_type = other DNA; mol_type = other DNA
ccggtgtacctggaaggctgtctga

SEQ ID NO: 5362 - DNA, 25 bp, synthetic construct
  source 1..25: mol_type = other DNA; mol_type = other DNA
ccggtgtacctggaaggctgtctaa

SEQ ID NO: 5363 - DNA, 25 bp, synthetic construct
  source 1..25: mol_type = other DNA; mol_type = other DNA
accggtgtacctggaaggctgtcta

SEQ ID NO: 5364 - DNA, 25 bp, synthetic construct
  source 1..25: mol_type = other DNA; mol_type = other DNA
accggtgtacctggaaggctatcta

SEQ ID NO: 5365 - DNA, 25 bp, synthetic construct
  source 1..25: mol_type = other DNA; mol_type = other DNA
caccggtgtacctggaaggctgtct

SEQ ID NO: 5366 - DNA, 25 bp, synthetic construct
  source 1..25: mol_type = other DNA; mol_type = other DNA
caccggtgtacctggaaggctatct

SEQ ID NO: 5367 - DNA, 25 bp, synthetic construct
  source 1..25: mol_type = other DNA; mol_type = other DNA
caccggtgtacctggaagactatct

SEQ ID NO: 5368 - DNA, 25 bp, synthetic construct
  source 1..25: mol_type = other DNA; mol_type = other DNA
ccaccggtgtacctggaaggctgtc

SEQ ID NO: 5369 - DNA, 25 bp, synthetic construct
  source 1..25: mol_type = other DNA; mol_type = other DNA
ccaccggtgtacctggaaggctatc

SEQ ID NO: 5370 - DNA, 25 bp, synthetic construct
  source 1..25: mol_type = other DNA; mol_type = other DNA
ccaccggtgtacctggaagactatc

SEQ ID NO: 5371 - DNA, 25 bp, synthetic construct
  source 1..25: mol_type = other DNA; mol_type = other DNA
accaccggtgtacctggaaggctat

SEQ ID NO: 5372 - DNA, 25 bp, synthetic construct
  source 1..25: mol_type = other DNA; mol_type = other DNA
accaccggtgtacctggaagactat

SEQ ID NO: 5373 - DNA, 25 bp, synthetic construct
  source 1..25: mol_type = other DNA; mol_type = other DNA
aaccaccggtgtacctggaaggctg

SEQ ID NO: 5374 - DNA, 25 bp, synthetic construct
  source 1..25: mol_type = other DNA; mol_type = other DNA
aaccaccggtgtacctggaaggcta

SEQ ID NO: 5375 - DNA, 25 bp, synthetic construct
  source 1..25: mol_type = other DNA; mol_type = other DNA
aaccaccggtgtacctggaagacta

SEQ ID NO: 5376 - DNA, 25 bp, synthetic construct
  source 1..25: mol_type = other DNA; mol_type = other DNA
aaaccaccggtgtacctggaaggct

SEQ ID NO: 5377 - DNA, 25 bp, synthetic construct
  source 1..25: mol_type = other DNA; mol_type = other DNA
aaaccaccggtgtacctggaagact

SEQ ID NO: 5378 - DNA, 25 bp, synthetic construct
  source 1..25: mol_type = other DNA; mol_type = other DNA
aaaccaccggtgtacctggaaaact

SEQ ID NO: 5379 - DNA, 25 bp, synthetic construct
  source 1..25: mol_type = other DNA; mol_type = other DNA
taaaccaccggtgtacctggaagac

SEQ ID NO: 5380 - DNA, 25 bp, synthetic construct
  source 1..25: mol_type = other DNA; mol_type = other DNA
taaaccaccggtgtacctggaaaac

SEQ ID NO: 5381 - DNA, 25 bp, synthetic construct
  source 1..25: mol_type = other DNA; mol_type = other DNA
gtaaaccaccggtgtacctggaagg

SEQ ID NO: 5382 - DNA, 25 bp, synthetic construct
  source 1..25: mol_type = other DNA; mol_type = other DNA
gtaaaccaccggtgtacctggaaga

SEQ ID NO: 5383 - DNA, 25 bp, synthetic construct
  source 1..25: mol_type = other DNA; mol_type = other DNA
gtaaaccaccggtgtacctggaaaa

SEQ ID NO: 5384 - DNA, 25 bp, synthetic construct
  source 1..25: mol_type = other DNA; mol_type = other DNA
tgtaaaccaccggtgtacctggaag

SEQ ID NO: 5385 - DNA, 25 bp, synthetic construct
  source 1..25: mol_type = other DNA; mol_type = other DNA
tgtaaaccaccggtgtacctggaaa

SEQ ID NO: 5386 - DNA, 25 bp, synthetic construct
  source 1..25: mol_type = other DNA; mol_type = other DNA
tgtaaaccaccggtgtacctgaaaa

SEQ ID NO: 5387 - DNA, 25 bp, synthetic construct
  source 1..25: mol_type = other DNA; mol_type = other DNA
ctgtaaaccaccggtgtacctgaaa

SEQ ID NO: 5388 - DNA, 25 bp, synthetic construct
  source 1..25: mol_type = other DNA; mol_type = other DNA
ctgtaaaccaccggtgtacctaaaa

SEQ ID NO: 5389 - DNA, 25 bp, synthetic construct
  source 1..25: mol_type = other DNA; mol_type = other DNA
cctgtaaaccaccggtgtacctgga

SEQ ID NO: 5390 - DNA, 25 bp, synthetic construct
  source 1..25: mol_type = other DNA; mol_type = other DNA
cctgtaaaccaccggtgtacctgaa

SEQ ID NO: 5391 - DNA, 25 bp, synthetic construct
  source 1..25: mol_type = other DNA; mol_type = other DNA
cctgtaaaccaccggtgtacctaaa

SEQ ID NO: 5392 - DNA, 25 bp, synthetic construct
  source 1..25: mol_type = other DNA; mol_type = other DNA
tcctgtaaaccaccggtgtacctgg

SEQ ID NO: 5393 - DNA, 25 bp, synthetic construct
  source 1..25: mol_type = other DNA; mol_type = other DNA
tcctgtaaaccaccggtgtacctga

SEQ ID NO: 5394 - DNA, 25 bp, synthetic construct
  source 1..25: mol_type = other DNA; mol_type = other DNA
tcctgtaaaccaccggtgtacctaa

SEQ ID NO: 5395 - DNA, 25 bp, synthetic construct
  source 1..25: mol_type = other DNA; mol_type = other DNA
ctcctgtaaaccaccggtgtaccta

SEQ ID NO: 5396 - DNA, 25 bp, synthetic construct
  source 1..25: mol_type = other DNA; mol_type = other DNA
ctcctgtaaaccaccggtataccta

SEQ ID NO: 5397 - DNA, 25 bp, synthetic construct
  source 1..25: mol_type = other DNA; mol_type = other DNA
gctcctgtaaaccaccggtgtacct

SEQ ID NO: 5398 - DNA, 25 bp, synthetic construct
  source 1..25: mol_type = other DNA; mol_type = other DNA
gctcctgtaaaccaccggtatacct

SEQ ID NO: 5399 - DNA, 25 bp, synthetic construct
  source 1..25: mol_type = other DNA; mol_type = other DNA
gctcctgtaaaccaccgatatacct

SEQ ID NO: 5400 - DNA, 25 bp, synthetic construct
  source 1..25: mol_type = other DNA; mol_type = other DNA
agctcctgtaaaccaccggtgtacc

SEQ ID NO: 5401 - DNA, 25 bp, synthetic construct
  source 1..25: mol_type = other DNA; mol_type = other DNA
agctcctgtaaaccaccggtatacc

SEQ ID NO: 5402 - DNA, 25 bp, synthetic construct
  source 1..25: mol_type = other DNA; mol_type = other DNA
agctcctgtaaaccaccgatatacc

SEQ ID NO: 5403 - DNA, 25 bp, synthetic construct
  source 1..25: mol_type = other DNA; mol_type = other DNA
gagctcctgtaaaccaccggtatac

SEQ ID NO: 5404 - DNA, 25 bp, synthetic construct
  source 1..25: mol_type = other DNA; mol_type = other DNA
gagctcctgtaaaccaccgatatac

SEQ ID NO: 5405 - DNA, 25 bp, synthetic construct
  source 1..25: mol_type = other DNA; mol_type = other DNA
tgagctcctgtaaaccaccggtata

SEQ ID NO: 5406 - DNA, 25 bp, synthetic construct
  source 1..25: mol_type = other DNA; mol_type = other DNA
tgagctcctgtaaaccaccgatata

SEQ ID NO: 5407 - DNA, 25 bp, synthetic construct
  source 1..25: mol_type = other DNA; mol_type = other DNA
ttgagctcctgtaaaccaccggtgt

SEQ ID NO: 5408 - DNA, 25 bp, synthetic construct
  source 1..25: mol_type = other DNA; mol_type = other DNA
ttgagctcctgtaaaccaccggtat

SEQ ID NO: 5409 - DNA, 25 bp, synthetic construct
  source 1..25: mol_type = other DNA; mol_type = other DNA
ttgagctcctgtaaaccaccgatat

SEQ ID NO: 5410 - DNA, 25 bp, synthetic construct
  source 1..25: mol_type = other DNA; mol_type = other DNA
cttgagctcctgtaaaccaccggta

SEQ ID NO: 5411 - DNA, 25 bp, synthetic construct
  source 1..25: mol_type = other DNA; mol_type = other DNA
cttgagctcctgtaaaccaccgata

SEQ ID NO: 5412 - DNA, 25 bp, synthetic construct
  source 1..25: mol_type = other DNA; mol_type = other DNA
ccttgagctcctgtaaaccaccggt

SEQ ID NO: 5413 - DNA, 25 bp, synthetic construct
  source 1..25: mol_type = other DNA; mol_type = other DNA
ccttgagctcctgtaaaccaccgat

SEQ ID NO: 5414 - DNA, 25 bp, synthetic construct
  source 1..25: mol_type = other DNA; mol_type = other DNA
ccttgagctcctgtaaaccaccaat

SEQ ID NO: 5415 - DNA, 25 bp, synthetic construct
  source 1..25: mol_type = other DNA; mol_type = other DNA
gccttgagctcctgtaaaccaccgg

SEQ ID NO: 5416 - DNA, 25 bp, synthetic construct
  source 1..25: mol_type = other DNA; mol_type = other DNA
gccttgagctcctgtaaaccaccga

SEQ ID NO: 5417 - DNA, 25 bp, synthetic construct
  source 1..25: mol_type = other DNA; mol_type = other DNA
gccttgagctcctgtaaaccaccaa

SEQ ID NO: 5418 - DNA, 25 bp, synthetic construct
  source 1..25: mol_type = other DNA; mol_type = other DNA
agccttgagctcctgtaaaccacca

SEQ ID NO: 5419 - DNA, 25 bp, synthetic construct
  source 1..25: mol_type = other DNA; mol_type = other DNA
agccttgagctcctataaaccacca

SEQ ID NO: 5420 - DNA, 25 bp, synthetic construct
  source 1..25: mol_type = other DNA; mol_type = other DNA
cagccttgagctcctgtaaaccacc

SEQ ID NO: 5421 - DNA, 25 bp, synthetic construct
  source 1..25: mol_type = other DNA; mol_type = other DNA
cagccttgagctcctataaaccacc

SEQ ID NO: 5422 - DNA, 25 bp, synthetic construct
  source 1..25: mol_type = other DNA; mol_type = other DNA
cagccttgaactcctataaaccacc

SEQ ID NO: 5423 - DNA, 25 bp, synthetic construct
  source 1..25: mol_type = other DNA; mol_type = other DNA
gcagccttgagctcctgtaaaccac

SEQ ID NO: 5424 - DNA, 25 bp, synthetic construct
  source 1..25: mol_type = other DNA; mol_type = other DNA
gcagccttgagctcctataaaccac

SEQ ID NO: 5425 - DNA, 25 bp, synthetic construct
  source 1..25: mol_type = other DNA; mol_type = other DNA
gcagccttgaactcctataaaccac

SEQ ID NO: 5426 - DNA, 25 bp, synthetic construct
  source 1..25: mol_type = other DNA; mol_type = other DNA
ggcagccttgagctcctataaacca

SEQ ID NO: 5427 - DNA, 25 bp, synthetic construct
  source 1..25: mol_type = other DNA; mol_type = other DNA
ggcagccttgaactcctataaacca

SEQ ID NO: 5428 - DNA, 25 bp, synthetic construct
  source 1..25: mol_type = other DNA; mol_type = other DNA
gggcagccttgagctcctgtaaacc

SEQ ID NO: 5429 - DNA, 25 bp, synthetic construct
  source 1..25: mol_type = other DNA; mol_type = other DNA
gggcagccttgagctcctataaacc

SEQ ID NO: 5430 - DNA, 25 bp, synthetic construct
  source 1..25: mol_type = other DNA; mol_type = other DNA
gggcagccttgaactcctataaacc

SEQ ID NO: 5431 - DNA, 25 bp, synthetic construct
  source 1..25: mol_type = other DNA; mol_type = other DNA
agggcagccttgagctcctgtaaac

SEQ ID NO: 5432 - DNA, 25 bp, synthetic construct
  source 1..25: mol_type = other DNA; mol_type = other DNA
gaggcagccttgagctcctgtaaac

SEQ ID NO: 5433 - DNA, 25 bp, synthetic construct
  source 1..25: mol_type = other DNA; mol_type = other DNA
ggagcagccttgagctcctgtaaac

SEQ ID NO: 5434 - DNA, 25 bp, synthetic construct
  source 1..25: mol_type = other DNA; mol_type = other DNA
gggacagccttgagctcctgtaaac

SEQ ID NO: 5435 - DNA, 25 bp, synthetic construct
  source 1..25: mol_type = other DNA; mol_type = other DNA
aaggcagccttgagctcctgtaaac

SEQ ID NO: 5436 - DNA, 25 bp, synthetic construct
  source 1..25: mol_type = other DNA; mol_type = other DNA
agagcagccttgagctcctgtaaac

SEQ ID NO: 5437 - DNA, 25 bp, synthetic construct
  source 1..25: mol_type = other DNA; mol_type = other DNA
gaagcagccttgagctcctgtaaac

SEQ ID NO: 5438 - DNA, 25 bp, synthetic construct
  source 1..25: mol_type = other DNA; mol_type = other DNA
gagacagccttgagctcctgtaaac

SEQ ID NO: 5439 - DNA, 25 bp, synthetic construct
  source 1..25: mol_type = other DNA; mol_type = other DNA
tagggcagccttgagctcctgtaaa

SEQ ID NO: 5440 - DNA, 25 bp, synthetic construct
  source 1..25: mol_type = other DNA; mol_type = other DNA
tgaggcagccttgagctcctgtaaa

SEQ ID NO: 5441 - DNA, 25 bp, synthetic construct
  source 1..25: mol_type = other DNA; mol_type = other DNA
tggagcagccttgagctcctgtaaa

SEQ ID NO: 5442 - DNA, 25 bp, synthetic construct
  source 1..25: mol_type = other DNA; mol_type = other DNA
tgggacagccttgagctcctgtaaa

SEQ ID NO: 5443 - DNA, 25 bp, synthetic construct
  source 1..25: mol_type = other DNA; mol_type = other DNA
taaggcagccttgagctcctgtaaa

SEQ ID NO: 5444 - DNA, 25 bp, synthetic construct
  source 1..25: mol_type = other DNA; mol_type = other DNA
tagagcagccttgagctcctgtaaa

SEQ ID NO: 5445 - DNA, 25 bp, synthetic construct
  source 1..25: mol_type = other DNA; mol_type = other DNA
tgaagcagccttgagctcctgtaaa

SEQ ID NO: 5446 - DNA, 25 bp, synthetic construct
  source 1..25: mol_type = other DNA; mol_type = other DNA
tgagacagccttgagctcctgtaaa

SEQ ID NO: 5447 - DNA, 25 bp, synthetic construct
  source 1..25: mol_type = other DNA; mol_type = other DNA
ctagggcagccttgagctcctgtaa

SEQ ID NO: 5448 - DNA, 25 bp, synthetic construct
  source 1..25: mol_type = other DNA; mol_type = other DNA
ctgaggcagccttgagctcctgtaa

SEQ ID NO: 5449 - DNA, 25 bp, synthetic construct
  source 1..25: mol_type = other DNA; mol_type = other DNA
ctggagcagccttgagctcctgtaa

SEQ ID NO: 5450 - DNA, 25 bp, synthetic construct
  source 1..25: mol_type = other DNA; mol_type = other DNA
ctgggacagccttgagctcctgtaa

SEQ ID NO: 5451 - DNA, 25 bp, synthetic construct
  source 1..25: mol_type = other DNA; mol_type = other DNA
ctaaggcagccttgagctcctgtaa

SEQ ID NO: 5452 - DNA, 25 bp, synthetic construct
  source 1..25: mol_type = other DNA; mol_type = other DNA
ctagagcagccttgagctcctgtaa

SEQ ID NO: 5453 - DNA, 25 bp, synthetic construct
  source 1..25: mol_type = other DNA; mol_type = other DNA
ctgaagcagccttgagctcctgtaa

SEQ ID NO: 5454 - DNA, 25 bp, synthetic construct
  source 1..25: mol_type = other DNA; mol_type = other DNA
ctgagacagccttgagctcctgtaa

SEQ ID NO: 5455 - DNA, 25 bp, synthetic construct
  source 1..25: mol_type = other DNA; mol_type = other DNA
tctagggcagccttgagctcctgta

SEQ ID NO: 5456 - DNA, 25 bp, synthetic construct
  source 1..25: mol_type = other DNA; mol_type = other DNA
tctgaggcagccttgagctcctgta

SEQ ID NO: 5457 - DNA, 25 bp, synthetic construct
  source 1..25: mol_type = other DNA; mol_type = other DNA
tctggagcagccttgagctcctgta

SEQ ID NO: 5458 - DNA, 25 bp, synthetic construct
  source 1..25: mol_type = other DNA; mol_type = other DNA
tctgggacagccttgagctcctgta

SEQ ID NO: 5459 - DNA, 25 bp, synthetic construct
  source 1..25: mol_type = other DNA; mol_type = other DNA
tctagagcagccttgagctcctgta

SEQ ID NO: 5460 - DNA, 25 bp, synthetic construct
  source 1..25: mol_type = other DNA; mol_type = other DNA
tctgaagcagccttgagctcctgta

SEQ ID NO: 5461 - DNA, 25 bp, synthetic construct
  source 1..25: mol_type = other DNA; mol_type = other DNA
tctgagacagccttgagctcctgta

SEQ ID NO: 5462 - DNA, 25 bp, synthetic construct
  source 1..25: mol_type = other DNA; mol_type = other DNA
ctctagggcagccttgagctcctgt

SEQ ID NO: 5463 - DNA, 25 bp, synthetic construct
  source 1..25: mol_type = other DNA; mol_type = other DNA
ctctgaggcagccttgagctcctgt

SEQ ID NO: 5464 - DNA, 25 bp, synthetic construct
  source 1..25: mol_type = other DNA; mol_type = other DNA
ctctggagcagccttgagctcctgt

SEQ ID NO: 5465 - DNA, 25 bp, synthetic construct
  source 1..25: mol_type = other DNA; mol_type = other DNA
ctctgggacagccttgagctcctgt

SEQ ID NO: 5466 - DNA, 25 bp, synthetic construct
  source 1..25: mol_type = other DNA; mol_type = other DNA
ctctagagcagccttgagctcctgt

SEQ ID NO: 5467 - DNA, 25 bp, synthetic construct
  source 1..25: mol_type = other DNA; mol_type = other DNA
ctctgaagcagccttgagctcctgt

SEQ ID NO: 5468 - DNA, 25 bp, synthetic construct
  source 1..25: mol_type = other DNA; mol_type = other DNA
ctctgagacagccttgagctcctgt

SEQ ID NO: 5469 - DNA, 25 bp, synthetic construct
  source 1..25: mol_type = other DNA; mol_type = other DNA
cctctagggcagccttgagctcctg

SEQ ID NO: 5470 - DNA, 25 bp, synthetic construct
  source 1..25: mol_type = other DNA; mol_type = other DNA
cctctgaggcagccttgagctcctg

SEQ ID NO: 5471 - DNA, 25 bp, synthetic construct
  source 1..25: mol_type = other DNA; mol_type = other DNA
cctctggagcagccttgagctcctg

SEQ ID NO: 5472 - DNA, 25 bp, synthetic construct
  source 1..25: mol_type = other DNA; mol_type = other DNA
cctctgggacagccttgagctcctg

SEQ ID NO: 5473 - DNA, 25 bp, synthetic construct
  source 1..25: mol_type = other DNA; mol_type = other DNA
cctctagagcagccttgagctcctg

SEQ ID NO: 5474 - DNA, 25 bp, synthetic construct
  source 1..25: mol_type = other DNA; mol_type = other DNA
cctctgaagcagccttgagctcctg

SEQ ID NO: 5475 - DNA, 25 bp, synthetic construct
  source 1..25: mol_type = other DNA; mol_type = other DNA
cctctgagacagccttgagctcctg

SEQ ID NO: 5476 - DNA, 25 bp, synthetic construct
  source 1..25: mol_type = other DNA; mol_type = other DNA
acctctagggcagccttgagctcct

SEQ ID NO: 5477 - DNA, 25 bp, synthetic construct
  source 1..25: mol_type = other DNA; mol_type = other DNA
acctctgaggcagccttgagctcct

SEQ ID NO: 5478 - DNA, 25 bp, synthetic construct
  source 1..25: mol_type = other DNA; mol_type = other DNA
acctctggagcagccttgagctcct

SEQ ID NO: 5479 - DNA, 25 bp, synthetic construct
  source 1..25: mol_type = other DNA; mol_type = other DNA
acctctgggacagccttgagctcct

SEQ ID NO: 5480 - DNA, 25 bp, synthetic construct
  source 1..25: mol_type = other DNA; mol_type = other DNA
acctctagagcagccttgagctcct

SEQ ID NO: 5481 - DNA, 25 bp, synthetic construct
  source 1..25: mol_type = other DNA; mol_type = other DNA
acctctgaagcagccttgagctcct

SEQ ID NO: 5482 - DNA, 25 bp, synthetic construct
  source 1..25: mol_type = other DNA; mol_type = other DNA
acctctgagacagccttgagctcct

SEQ ID NO: 5483 - DNA, 25 bp, synthetic construct
  source 1..25: mol_type = other DNA; mol_type = other DNA
cacctctagggcagccttgagctcc

SEQ ID NO: 5484 - DNA, 25 bp, synthetic construct
  source 1..25: mol_type = other DNA; mol_type = other DNA
cacctctgaggcagccttgagctcc

SEQ ID NO: 5485 - DNA, 25 bp, synthetic construct
  source 1..25: mol_type = other DNA; mol_type = other DNA
cacctctggagcagccttgagctcc

SEQ ID NO: 5486 - DNA, 25 bp, synthetic construct
  source 1..25: mol_type = other DNA; mol_type = other DNA
cacctctgggacagccttgagctcc

SEQ ID NO: 5487 - DNA, 25 bp, synthetic construct
  source 1..25: mol_type = other DNA; mol_type = other DNA
cacctctagagcagccttgagctcc

SEQ ID NO: 5488 - DNA, 25 bp, synthetic construct
  source 1..25: mol_type = other DNA; mol_type = other DNA
cacctctgaagcagccttgagctcc

SEQ ID NO: 5489 - DNA, 25 bp, synthetic construct
  source 1..25: mol_type = other DNA; mol_type = other DNA
cacctctgagacagccttgagctcc

SEQ ID NO: 5490 - DNA, 25 bp, synthetic construct
  source 1..25: mol_type = other DNA; mol_type = other DNA
acacctctagggcagccttgagctc

SEQ ID NO: 5491 - DNA, 25 bp, synthetic construct
  source 1..25: mol_type = other DNA; mol_type = other DNA
acacctctgaggcagccttgagctc

SEQ ID NO: 5492 - DNA, 25 bp, synthetic construct
  source 1..25: mol_type = other DNA; mol_type = other DNA
acacctctggagcagccttgagctc

SEQ ID NO: 5493 - DNA, 25 bp, synthetic construct
  source 1..25: mol_type = other DNA; mol_type = other DNA
acacctctgggacagccttgagctc

SEQ ID NO: 5494 - DNA, 25 bp, synthetic construct
  source 1..25: mol_type = other DNA; mol_type = other DNA
acacctctagagcagccttgagctc

SEQ ID NO: 5495 - DNA, 25 bp, synthetic construct
  source 1..25: mol_type = other DNA; mol_type = other DNA
acacctctgaagcagccttgagctc

SEQ ID NO: 5496 - DNA, 25 bp, synthetic construct
  source 1..25: mol_type = other DNA; mol_type = other DNA
acacctctgagacagccttgagctc

SEQ ID NO: 5497 - DNA, 25 bp, synthetic construct
  source 1..25: mol_type = other DNA; mol_type = other DNA
gacacctctagggcagccttgagct

SEQ ID NO: 5498 - DNA, 25 bp, synthetic construct
  source 1..25: mol_type = other DNA; mol_type = other DNA
gacacctctgaggcagccttgagct

SEQ ID NO: 5499 - DNA, 25 bp, synthetic construct
  source 1..25: mol_type = other DNA; mol_type = other DNA
gacacctctggagcagccttgagct

SEQ ID NO: 5500 - DNA, 25 bp, synthetic construct
  source 1..25: mol_type = other DNA; mol_type = other DNA
gacacctctgggacagccttgagct

SEQ ID NO: 5501 - DNA, 25 bp, synthetic construct
  source 1..25: mol_type = other DNA; mol_type = other DNA
gacacctctagagcagccttgagct

SEQ ID NO: 5502 - DNA, 25 bp, synthetic construct
  source 1..25: mol_type = other DNA; mol_type = other DNA
gacacctctgaagcagccttgagct

SEQ ID NO: 5503 - DNA, 25 bp, synthetic construct
  source 1..25: mol_type = other DNA; mol_type = other DNA
gacacctctgagacagccttgagct

SEQ ID NO: 5504 - DNA, 25 bp, synthetic construct
  source 1..25: mol_type = other DNA; mol_type = other DNA
agacacctcttgggcagccttgagc

SEQ ID NO: 5505 - DNA, 25 bp, synthetic construct
  source 1..25: mol_type = other DNA; mol_type = other DNA
agacacctctgtggcagccttgagc

SEQ ID NO: 5506 - DNA, 25 bp, synthetic construct
  source 1..25: mol_type = other DNA; mol_type = other DNA
agacacctctggtgcagccttgagc

SEQ ID NO: 5507 - DNA, 25 bp, synthetic construct
  source 1..25: mol_type = other DNA; mol_type = other DNA
agacacctctgggtcagccttgagc

SEQ ID NO: 5508 - DNA, 25 bp, synthetic construct
  source 1..25: mol_type = other DNA; mol_type = other DNA
agacacctctagagcagccttgagc

SEQ ID NO: 5509 - DNA, 25 bp, synthetic construct
  source 1..25: mol_type = other DNA; mol_type = other DNA
agacacctctgaagcagccttgagc

SEQ ID NO: 5510 - DNA, 25 bp, synthetic construct
  source 1..25: mol_type = other DNA; mol_type = other DNA
agacacctctgagacagccttgagc

SEQ ID NO: 5511 - DNA, 25 bp, synthetic construct
  source 1..25: mol_type = other DNA; mol_type = other DNA
cagacacctcttgggcagccttgag

SEQ ID NO: 5512 - DNA, 25 bp, synthetic construct
  source 1..25: mol_type = other DNA; mol_type = other DNA
cagacacctctgtggcagccttgag

SEQ ID NO: 5513 - DNA, 25 bp, synthetic construct
  source 1..25: mol_type = other DNA; mol_type = other DNA
cagacacctctggtgcagccttgag

SEQ ID NO: 5514 - DNA, 25 bp, synthetic construct
  source 1..25: mol_type = other DNA; mol_type = other DNA
cagacacctctgggtcagccttgag

SEQ ID NO: 5515 - DNA, 25 bp, synthetic construct
  source 1..25: mol_type = other DNA; mol_type = other DNA
cagacacctctagagcagccttgag

SEQ ID NO: 5516 - DNA, 25 bp, synthetic construct
  source 1..25: mol_type = other DNA; mol_type = other DNA
cagacacctctgaagcagccttgag

SEQ ID NO: 5517 - DNA, 25 bp, synthetic construct
  source 1..25: mol_type = other DNA; mol_type = other DNA
cagacacctctgagacagccttgag

SEQ ID NO: 5518 - DNA, 25 bp, synthetic construct
  source 1..25: mol_type = other DNA; mol_type = other DNA
acagacacctcttgggcagccttga

SEQ ID NO: 5519 - DNA, 25 bp, synthetic construct
  source 1..25: mol_type = other DNA; mol_type = other DNA
acagacacctctgtggcagccttga

SEQ ID NO: 5520 - DNA, 25 bp, synthetic construct
  source 1..25: mol_type = other DNA; mol_type = other DNA
acagacacctctggtgcagccttga

SEQ ID NO: 5521 - DNA, 25 bp, synthetic construct
  source 1..25: mol_type = other DNA; mol_type = other DNA
acagacacctctgggtcagccttga

SEQ ID NO: 5522 - DNA, 25 bp, synthetic construct
  source 1..25: mol_type = other DNA; mol_type = other DNA
acagacacctctagagcagccttga

SEQ ID NO: 5523 - DNA, 25 bp, synthetic construct
  source 1..25: mol_type = other DNA; mol_type = other DNA
acagacacctctgagacagccttga

SEQ ID NO: 5524 - DNA, 25 bp, synthetic construct
  source 1..25: mol_type = other DNA; mol_type = other DNA
acagacacctctgaggcaaccttga

SEQ ID NO: 5525 - DNA, 25 bp, synthetic construct
  source 1..25: mol_type = other DNA; mol_type = other DNA
gacagacacctcttgggcagccttg

SEQ ID NO: 5526 - DNA, 25 bp, synthetic construct
  source 1..25: mol_type = other DNA; mol_type = other DNA
gacagacacctctgtggcagccttg

SEQ ID NO: 5527 - DNA, 25 bp, synthetic construct
  source 1..25: mol_type = other DNA; mol_type = other DNA
gacagacacctctggtgcagccttg

SEQ ID NO: 5528 - DNA, 25 bp, synthetic construct
  source 1..25: mol_type = other DNA; mol_type = other DNA
gacagacacctctgggtcagccttg

SEQ ID NO: 5529 - DNA, 25 bp, synthetic construct
  source 1..25: mol_type = other DNA; mol_type = other DNA
gacagacacctctagagcagccttg

SEQ ID NO: 5530 - DNA, 25 bp, synthetic construct
  source 1..25: mol_type = other DNA; mol_type = other DNA
gacagacacctctgaagcagccttg

SEQ ID NO: 5531 - DNA, 25 bp, synthetic construct
  source 1..25: mol_type = other DNA; mol_type = other DNA
gacagacacctctgagacagccttg

SEQ ID NO: 5532 - DNA, 25 bp, synthetic construct
  source 1..25: mol_type = other DNA; mol_type = other DNA
agacagacacctctgggacaacctt

SEQ ID NO: 5533 - DNA, 25 bp, synthetic construct
  source 1..25: mol_type = other DNA; mol_type = other DNA
agacagacacctcttgggcagcctt

SEQ ID NO: 5534 - DNA, 25 bp, synthetic construct
  source 1..25: mol_type = other DNA; mol_type = other DNA
agacagacacctctgtggcagcctt

SEQ ID NO: 5535 - DNA, 25 bp, synthetic construct
  source 1..25: mol_type = other DNA; mol_type = other DNA
agacagacacctctggtgcagcctt

SEQ ID NO: 5536 - DNA, 25 bp, synthetic construct
  source 1..25: mol_type = other DNA; mol_type = other DNA
agacagacacctctgggtcagcctt

SEQ ID NO: 5537 - DNA, 25 bp, synthetic construct
  source 1..25: mol_type = other DNA; mol_type = other DNA
gagacagacacctctgggacaacct

SEQ ID NO: 5538 - DNA, 25 bp, synthetic construct
  source 1..25: mol_type = other DNA; mol_type = other DNA
gagacagacacctcttgggcagcct

SEQ ID NO: 5539 - DNA, 25 bp, synthetic construct
  source 1..25: mol_type = other DNA; mol_type = other DNA
gagacagacacctctgtggcagcct

SEQ ID NO: 5540 - DNA, 25 bp, synthetic construct
  source 1..25: mol_type = other DNA; mol_type = other DNA
gagacagacacctctggtgcagcct

SEQ ID NO: 5541 - DNA, 25 bp, synthetic construct
  source 1..25: mol_type = other DNA; mol_type = other DNA
gagacagacacctctgggtcagcct

SEQ ID NO: 5542 - DNA, 25 bp, synthetic construct
  source 1..25: mol_type = other DNA; mol_type = other DNA
agagacagacacctctgggacaacc

SEQ ID NO: 5543 - DNA, 25 bp, synthetic construct
  source 1..25: mol_type = other DNA; mol_type = other DNA
agagacagacacctcttgggcagcc

SEQ ID NO: 5544 - DNA, 25 bp, synthetic construct
  source 1..25: mol_type = other DNA; mol_type = other DNA
agagacagacacctctgtggcagcc

SEQ ID NO: 5545 - DNA, 25 bp, synthetic construct
  source 1..25: mol_type = other DNA; mol_type = other DNA
agagacagacacctctggtgcagcc

SEQ ID NO: 5546 - DNA, 25 bp, synthetic construct
  source 1..25: mol_type = other DNA; mol_type = other DNA
agagacagacacctctgggtcagcc

SEQ ID NO: 5547 - DNA, 25 bp, synthetic construct
  source 1..25: mol_type = other DNA; mol_type = other DNA
cagagacagacacctctgggacaac

SEQ ID NO: 5548 - DNA, 25 bp, synthetic construct
  source 1..25: mol_type = other DNA; mol_type = other DNA
cagagacagacacctcttgggcagc

SEQ ID NO: 5549 - DNA, 25 bp, synthetic construct
  source 1..25: mol_type = other DNA; mol_type = other DNA
cagagacagacacctctgtggcagc

SEQ ID NO: 5550 - DNA, 25 bp, synthetic construct
  source 1..25: mol_type = other DNA; mol_type = other DNA
cagagacagacacctctggtgcagc

SEQ ID NO: 5551 - DNA, 25 bp, synthetic construct
  source 1..25: mol_type = other DNA; mol_type = other DNA
cagagacagacacctctgggtcagc

SEQ ID NO: 5552 - DNA, 25 bp, synthetic construct
  source 1..25: mol_type = other DNA; mol_type = other DNA
acagagacagacacctctgggacaa

SEQ ID NO: 5553 - DNA, 25 bp, synthetic construct
  source 1..25: mol_type = other DNA; mol_type = other DNA
acagagacagacacctcttgggcag

SEQ ID NO: 5554 - DNA, 25 bp, synthetic construct
  source 1..25: mol_type = other DNA; mol_type = other DNA
acagagacagacacctctgtggcag

SEQ ID NO: 5555 - DNA, 25 bp, synthetic construct
  source 1..25: mol_type = other DNA; mol_type = other DNA
acagagacagacacctctggtgcag

SEQ ID NO: 5556 - DNA, 25 bp, synthetic construct
  source 1..25: mol_type = other DNA; mol_type = other DNA
acagagacagacacctctgggtcag

SEQ ID NO: 5557 - DNA, 25 bp, synthetic construct
  source 1..25: mol_type = other DNA; mol_type = other DNA
cacagagacagacacctctgggaca

SEQ ID NO: 5558 - DNA, 25 bp, synthetic construct
  source 1..25: mol_type = other DNA; mol_type = other DNA
cacagagacagacacctctggaaca

SEQ ID NO: 5559 - DNA, 25 bp, synthetic construct
  source 1..25: mol_type = other DNA; mol_type = other DNA
acacagagacagacacctctgggac

SEQ ID NO: 5560 - DNA, 25 bp, synthetic construct
  source 1..25: mol_type = other DNA; mol_type = other DNA
acacagagacagacacctctggaac

SEQ ID NO: 5561 - DNA, 25 bp, synthetic construct
  source 1..25: mol_type = other DNA; mol_type = other DNA
gacacagagacagacacctctggga

SEQ ID NO: 5562 - DNA, 25 bp, synthetic construct
  source 1..25: mol_type = other DNA; mol_type = other DNA
gacacagagacagacacctctggaa

SEQ ID NO: 5563 - DNA, 25 bp, synthetic construct
  source 1..25: mol_type = other DNA; mol_type = other DNA
ggacacagagacagacacctctgga

SEQ ID NO: 5564 - DNA, 25 bp, synthetic construct
  source 1..25: mol_type = other DNA; mol_type = other DNA
ggacacagagacagacacctctgaa

SEQ ID NO: 5565 - DNA, 25 bp, synthetic construct
  source 1..25: mol_type = other DNA; mol_type = other DNA
tggacacagagacagacacctctgg

SEQ ID NO: 5566 - DNA, 25 bp, synthetic construct
  source 1..25: mol_type = other DNA; mol_type = other DNA
tggacacagagacagacacctctga

SEQ ID NO: 5567 - DNA, 25 bp, synthetic construct
  source 1..25: mol_type = other DNA; mol_type = other DNA
tggacacagagacagacacctctaa

SEQ ID NO: 5568 - DNA, 25 bp, synthetic construct
  source 1..25: mol_type = other DNA; mol_type = other DNA
atggacacagagacagacacctctg

SEQ ID NO: 5569 - DNA, 25 bp, synthetic construct
  source 1..25: mol_type = other DNA; mol_type = other DNA
atggacacagagacagacacctcta

SEQ ID NO: 5570 - DNA, 25 bp, synthetic construct
  source 1..25: mol_type = other DNA; mol_type = other DNA
atggacacagagacaaacacctcta

SEQ ID NO: 5571 - DNA, 25 bp, synthetic construct
  source 1..25: mol_type = other DNA; mol_type = other DNA
catggacacagagacaaacacctct

SEQ ID NO: 5572 - DNA, 25 bp, synthetic construct
  source 1..25: mol_type = other DNA; mol_type = other DNA
catggacacagaaacaaacacctct

SEQ ID NO: 5573 - DNA, 25 bp, synthetic construct
  source 1..25: mol_type = other DNA; mol_type = other DNA
acatggacacagagacagacacctc

SEQ ID NO: 5574 - DNA, 25 bp, synthetic construct
  source 1..25: mol_type = other DNA; mol_type = other DNA
acatggacacagagacaaacacctc

SEQ ID NO: 5575 - DNA, 25 bp, synthetic construct
  source 1..25: mol_type = other DNA; mol_type = other DNA
acatggacacagaaacaaacacctc

SEQ ID NO: 5576 - DNA, 25 bp, synthetic construct
  source 1..25: mol_type = other DNA; mol_type = other DNA
cacatggacacagagacagacacct

SEQ ID NO: 5577 - DNA, 25 bp, synthetic construct
  source 1..25: mol_type = other DNA; mol_type = other DNA
cacatggacacagagacaaacacct

SEQ ID NO: 5578 - DNA, 25 bp, synthetic construct
  source 1..25: mol_type = other DNA; mol_type = other DNA
cacatggacacagaaacaaacacct

SEQ ID NO: 5579 - DNA, 25 bp, synthetic construct
  source 1..25: mol_type = other DNA; mol_type = other DNA
tcacatggacacagagacaaacacc

SEQ ID NO: 5580 - DNA, 25 bp, synthetic construct
  source 1..25: mol_type = other DNA; mol_type = other DNA
tcacatggacacagaaacaaacacc

SEQ ID NO: 5581 - DNA, 25 bp, synthetic construct
  source 1..25: mol_type = other DNA; mol_type = other DNA
gtcacatggacacagagacagacac

SEQ ID NO: 5582 - DNA, 25 bp, synthetic construct
  source 1..25: mol_type = other DNA; mol_type = other DNA
gtcacatggacacagagacaaacac

SEQ ID NO: 5583 - DNA, 25 bp, synthetic construct
  source 1..25: mol_type = other DNA; mol_type = other DNA
gtcacatggacacagaaacaaacac

SEQ ID NO: 5584 - DNA, 25 bp, synthetic construct
  source 1..25: mol_type = other DNA; mol_type = other DNA
agtcacatggacacagagacagaca

SEQ ID NO: 5585 - DNA, 25 bp, synthetic construct
  source 1..25: mol_type = other DNA; mol_type = other DNA
agtcacatggacacagagacaaaca

SEQ ID NO: 5586 - DNA, 25 bp, synthetic construct
  source 1..25: mol_type = other DNA; mol_type = other DNA
agtcacatggacacagaaacaaaca

SEQ ID NO: 5587 - DNA, 25 bp, synthetic construct
  source 1..25: mol_type = other DNA; mol_type = other DNA
aagtcacatggacacagagacaaac

SEQ ID NO: 5588 - DNA, 25 bp, synthetic construct
  source 1..25: mol_type = other DNA; mol_type = other DNA
aagtcacatggacacagaaacaaac

SEQ ID NO: 5589 - DNA, 25 bp, synthetic construct
  source 1..25: mol_type = other DNA; mol_type = other DNA
caagtcacatggacacagagacaga

SEQ ID NO: 5590 - DNA, 25 bp, synthetic construct
  source 1..25: mol_type = other DNA; mol_type = other DNA
caagtcacatggacacagagacaaa

SEQ ID NO: 5591 - DNA, 25 bp, synthetic construct
  source 1..25: mol_type = other DNA; mol_type = other DNA
caagtcacatggacacagaaacaaa

SEQ ID NO: 5592 - DNA, 25 bp, synthetic construct
  source 1..25: mol_type = other DNA; mol_type = other DNA
tcaagtcacatggacacagagacag

SEQ ID NO: 5593 - DNA, 25 bp, synthetic construct
  source 1..25: mol_type = other DNA; mol_type = other DNA
tcaagtcacatggacacagagacaa

SEQ ID NO: 5594 - DNA, 25 bp, synthetic construct
  source 1..25: mol_type = other DNA; mol_type = other DNA
tcaagtcacatggacacagaaacaa

SEQ ID NO: 5595 - DNA, 25 bp, synthetic construct
  source 1..25: mol_type = other DNA; mol_type = other DNA
gtcaagtcacatggacacagaaaca

SEQ ID NO: 5596 - DNA, 25 bp, synthetic construct
  source 1..25: mol_type = other DNA; mol_type = other DNA
gtcaagtcacatggacacaaaaaca

SEQ ID NO: 5597 - DNA, 25 bp, synthetic construct
  source 1..25: mol_type = other DNA; mol_type = other DNA
agtcaagtcacatggacacagagac

SEQ ID NO: 5598 - DNA, 25 bp, synthetic construct
  source 1..25: mol_type = other DNA; mol_type = other DNA
agtcaagtcacatggacacagaaac

SEQ ID NO: 5599 - DNA, 25 bp, synthetic construct
  source 1..25: mol_type = other DNA; mol_type = other DNA
agtcaagtcacatggacacaaaaac

SEQ ID NO: 5600 - DNA, 25 bp, synthetic construct
  source 1..25: mol_type = other DNA; mol_type = other DNA
aagtcaagtcacatggacacagaga

SEQ ID NO: 5601 - DNA, 25 bp, synthetic construct
  source 1..25: mol_type = other DNA; mol_type = other DNA
aagtcaagtcacatggacacagaaa

SEQ ID NO: 5602 - DNA, 25 bp, synthetic construct
  source 1..25: mol_type = other DNA; mol_type = other DNA
aagtcaagtcacatggacacaaaaa

SEQ ID NO: 5603 - DNA, 25 bp, synthetic construct
  source 1..25: mol_type = other DNA; mol_type = other DNA
gaagtcaagtcacatggacacagaa

SEQ ID NO: 5604 - DNA, 25 bp, synthetic construct
  source 1..25: mol_type = other DNA; mol_type = other DNA
gaagtcaagtcacatggacacaaaa

SEQ ID NO: 5605 - DNA, 25 bp, synthetic construct
  source 1..25: mol_type = other DNA; mol_type = other DNA
agaagtcaagtcacatggacacaga

SEQ ID NO: 5606 - DNA, 25 bp, synthetic construct
  source 1..25: mol_type = other DNA; mol_type = other DNA
agaagtcaagtcacatggacacaaa

SEQ ID NO: 5607 - DNA, 25 bp, synthetic construct
  source 1..25: mol_type = other DNA; mol_type = other DNA
agaagtcaagtcacatgaacacaaa

SEQ ID NO: 5608 - DNA, 25 bp, synthetic construct
  source 1..25: mol_type = other DNA; mol_type = other DNA
gagaagtcaagtcacatggacacag

SEQ ID NO: 5609 - DNA, 25 bp, synthetic construct
  source 1..25: mol_type = other DNA; mol_type = other DNA
gagaagtcaagtcacatggacacaa

SEQ ID NO: 5610 - DNA, 25 bp, synthetic construct
  source 1..25: mol_type = other DNA; mol_type = other DNA
gagaagtcaagtcacatgaacacaa

SEQ ID NO: 5611 - DNA, 25 bp, synthetic construct
  source 1..25: mol_type = other DNA; mol_type = other DNA
agagaagtcaagtcacatgaacaca

SEQ ID NO: 5612 - DNA, 25 bp, synthetic construct
  source 1..25: mol_type = other DNA; mol_type = other DNA
agagaagtcaagtcacataaacaca

SEQ ID NO: 5613 - DNA, 25 bp, synthetic construct
  source 1..25: mol_type = other DNA; mol_type = other DNA
cagagaagtcaagtcacatggacac

SEQ ID NO: 5614 - DNA, 25 bp, synthetic construct
  source 1..25: mol_type = other DNA; mol_type = other DNA
cagagaagtcaagtcacatgaacac

SEQ ID NO: 5615 - DNA, 25 bp, synthetic construct
  source 1..25: mol_type = other DNA; mol_type = other DNA
cagagaagtcaagtcacataaacac

SEQ ID NO: 5616 - DNA, 25 bp, synthetic construct
  source 1..25: mol_type = other DNA; mol_type = other DNA
tcagagaagtcaagtcacatggaca

SEQ ID NO: 5617 - DNA, 25 bp, synthetic construct
  source 1..25: mol_type = other DNA; mol_type = other DNA
tcagagaagtcaagtcacatgaaca

SEQ ID NO: 5618 - DNA, 25 bp, synthetic construct
  source 1..25: mol_type = other DNA; mol_type = other DNA
tcagagaagtcaagtcacataaaca

SEQ ID NO: 5619 - DNA, 25 bp, synthetic construct
  source 1..25: mol_type = other DNA; mol_type = other DNA
ttcagagaagtcaagtcacatgaac

SEQ ID NO: 5620 - DNA, 25 bp, synthetic construct
  source 1..25: mol_type = other DNA; mol_type = other DNA
ttcagagaagtcaagtcacataaac

SEQ ID NO: 5621 - DNA, 25 bp, synthetic construct
  source 1..25: mol_type = other DNA; mol_type = other DNA
gttcagagaagtcaagtcacatgga

SEQ ID NO: 5622 - DNA, 25 bp, synthetic construct
  source 1..25: mol_type = other DNA; mol_type = other DNA
gttcagagaagtcaagtcacatgaa

SEQ ID NO: 5623 - DNA, 25 bp, synthetic construct
  source 1..25: mol_type = other DNA; mol_type = other DNA
gttcagagaagtcaagtcacataaa

SEQ ID NO: 5624 - DNA, 25 bp, synthetic construct
  source 1..25: mol_type = other DNA; mol_type = other DNA
ggttcagagaagtcaagtcacatgg

SEQ ID NO: 5625 - DNA, 25 bp, synthetic construct
  source 1..25: mol_type = other DNA; mol_type = other DNA
ggttcagagaagtcaagtcacatga

SEQ ID NO: 5626 - DNA, 25 bp, synthetic construct
  source 1..25: mol_type = other DNA; mol_type = other DNA
ggttcagagaagtcaagtcacataa

SEQ ID NO: 5627 - DNA, 25 bp, synthetic construct
  source 1..25: mol_type = other DNA; mol_type = other DNA
aggttcagagaagtcaagtcacata

SEQ ID NO: 5628 - DNA, 25 bp, synthetic construct
  source 1..25: mol_type = other DNA; mol_type = other DNA
aggttcagagaagtcaaatcacata

SEQ ID NO: 5629 - DNA, 25 bp, synthetic construct
  source 1..25: mol_type = other DNA; mol_type = other DNA
aaggttcagagaagtcaagtcacat

SEQ ID NO: 5630 - DNA, 25 bp, synthetic construct
  source 1..25: mol_type = other DNA; mol_type = other DNA
aaggttcagagaagtcaaatcacat

SEQ ID NO: 5631 - DNA, 25 bp, synthetic construct
  source 1..25: mol_type = other DNA; mol_type = other DNA
aaggttcagagaaatcaaatcacat

SEQ ID NO: 5632 - DNA, 25 bp, synthetic construct
  source 1..25: mol_type = other DNA; mol_type = other DNA
caaggttcagagaagtcaagtcaca

SEQ ID NO: 5633 - DNA, 25 bp, synthetic construct
  source 1..25: mol_type = other DNA; mol_type = other DNA
caaggttcagagaagtcaaatcaca

SEQ ID NO: 5634 - DNA, 25 bp, synthetic construct
  source 1..25: mol_type = other DNA; mol_type = other DNA
caaggttcagagaaatcaaatcaca

SEQ ID NO: 5635 - DNA, 25 bp, synthetic construct
  source 1..25: mol_type = other DNA; mol_type = other DNA
ccaaggttcagagaagtcaaatcac

SEQ ID NO: 5636 - DNA, 25 bp, synthetic construct
  source 1..25: mol_type = other DNA; mol_type = other DNA
ccaaggttcagagaaatcaaatcac

SEQ ID NO: 5637 - DNA, 25 bp, synthetic construct
  source 1..25: mol_type = other DNA; mol_type = other DNA
accaaggttcagagaagtcaagtca

SEQ ID NO: 5638 - DNA, 25 bp, synthetic construct
  source 1..25: mol_type = other DNA; mol_type = other DNA
accaaggttcagagaagtcaaatca

SEQ ID NO: 5639 - DNA, 25 bp, synthetic construct
  source 1..25: mol_type = other DNA; mol_type = other DNA
accaaggttcagagaaatcaaatca

SEQ ID NO: 5640 - DNA, 25 bp, synthetic construct
  source 1..25: mol_type = other DNA; mol_type = other DNA
aaccaaggttcagagaagtcaagtc

SEQ ID NO: 5641 - DNA, 25 bp, synthetic construct
  source 1..25: mol_type = other DNA; mol_type = other DNA
aaccaaggttcagagaagtcaaatc

SEQ ID NO: 5642 - DNA, 25 bp, synthetic construct
  source 1..25: mol_type = other DNA; mol_type = other DNA
aaccaaggttcagagaaatcaaatc

SEQ ID NO: 5643 - DNA, 25 bp, synthetic construct
  source 1..25: mol_type = other DNA; mol_type = other DNA
gaaccaaggttcagagaagtcaaat

SEQ ID NO: 5644 - DNA, 25 bp, synthetic construct
  source 1..25: mol_type = other DNA; mol_type = other DNA
gaaccaaggttcagagaaatcaaat

SEQ ID NO: 5645 - DNA, 25 bp, synthetic construct
  source 1..25: mol_type = other DNA; mol_type = other DNA
agaaccaaggttcagagaagtcaag

SEQ ID NO: 5646 - DNA, 25 bp, synthetic construct
  source 1..25: mol_type = other DNA; mol_type = other DNA
agaaccaaggttcagagaagtcaaa

SEQ ID NO: 5647 - DNA, 25 bp, synthetic construct
  source 1..25: mol_type = other DNA; mol_type = other DNA
agaaccaaggttcagagaaatcaaa

SEQ ID NO: 5648 - DNA, 25 bp, synthetic construct
  source 1..25: mol_type = other DNA; mol_type = other DNA
aagaaccaaggttcagagaagtcaa

SEQ ID NO: 5649 - DNA, 25 bp, synthetic construct
  source 1..25: mol_type = other DNA; mol_type = other DNA
aagaaccaaggttcagagaaatcaa

SEQ ID NO: 5650 - DNA, 25 bp, synthetic construct
  source 1..25: mol_type = other DNA; mol_type = other DNA
aagaaccaaggttcagaaaaatcaa

SEQ ID NO: 5651 - DNA, 25 bp, synthetic construct
  source 1..25: mol_type = other DNA; mol_type = other DNA
gaagaaccaaggttcagagaaatca

SEQ ID NO: 5652 - DNA, 25 bp, synthetic construct
  source 1..25: mol_type = other DNA; mol_type = other DNA
gaagaaccaaggttcagaaaaatca

SEQ ID NO: 5653 - DNA, 25 bp, synthetic construct
  source 1..25: mol_type = other DNA; mol_type = other DNA
ggaagaaccaaggttcagagaagtc

SEQ ID NO: 5654 - DNA, 25 bp, synthetic construct
  source 1..25: mol_type = other DNA; mol_type = other DNA
ggaagaaccaaggttcagagaaatc

SEQ ID NO: 5655 - DNA, 25 bp, synthetic construct
  source 1..25: mol_type = other DNA; mol_type = other DNA
ggaagaaccaaggttcagaaaaatc

SEQ ID NO: 5656 - DNA, 25 bp, synthetic construct
  source 1..25: mol_type = other DNA; mol_type = other DNA
gggaagaaccaaggttcagagaagt

SEQ ID NO: 5657 - DNA, 25 bp, synthetic construct
  source 1..25: mol_type = other DNA; mol_type = other DNA
gggaagaaccaaggttcagagaaat

SEQ ID NO: 5658 - DNA, 25 bp, synthetic construct
  source 1..25: mol_type = other DNA; mol_type = other DNA
gggaagaaccaaggttcagaaaaat

SEQ ID NO: 5659 - DNA, 25 bp, synthetic construct
  source 1..25: mol_type = other DNA; mol_type = other DNA
agggaagaaccaaggttcagagaaa

SEQ ID NO: 5660 - DNA, 25 bp, synthetic construct
  source 1..25: mol_type = other DNA; mol_type = other DNA
agggaagaaccaaggttcagaaaaa

SEQ ID NO: 5661 - DNA, 25 bp, synthetic construct
  source 1..25: mol_type = other DNA; mol_type = other DNA
cagggaagaaccaaggttcagagaa

SEQ ID NO: 5662 - DNA, 25 bp, synthetic construct
  source 1..25: mol_type = other DNA; mol_type = other DNA
cagggaagaaccaaggttcagaaaa

SEQ ID NO: 5663 - DNA, 25 bp, synthetic construct
  source 1..25: mol_type = other DNA; mol_type = other DNA
cagggaagaaccaaggttcaaaaaa

SEQ ID NO: 5664 - DNA, 25 bp, synthetic construct
  source 1..25: mol_type = other DNA; mol_type = other DNA
ccagggaagaaccaaggttcagaga

SEQ ID NO: 5665 - DNA, 25 bp, synthetic construct
  source 1..25: mol_type = other DNA; mol_type = other DNA
ccagggaagaaccaaggttcagaaa

SEQ ID NO: 5666 - DNA, 25 bp, synthetic construct
  source 1..25: mol_type = other DNA; mol_type = other DNA
ccagggaagaaccaaggttcaaaaa

SEQ ID NO: 5667 - DNA, 25 bp, synthetic construct
  source 1..25: mol_type = other DNA; mol_type = other DNA
tccagggaagaaccaaggttcagaa

SEQ ID NO: 5668 - DNA, 25 bp, synthetic construct
  source 1..25: mol_type = other DNA; mol_type = other DNA
tccagggaagaaccaaggttcaaaa

SEQ ID NO: 5669 - DNA, 25 bp, synthetic construct
  source 1..25: mol_type = other DNA; mol_type = other DNA
ttccagggaagaaccaaggttcaga

SEQ ID NO: 5670 - DNA, 25 bp, synthetic construct
  source 1..25: mol_type = other DNA; mol_type = other DNA
ttccagggaagaaccaaggttcaaa

SEQ ID NO: 5671 - DNA, 25 bp, synthetic construct
  source 1..25: mol_type = other DNA; mol_type = other DNA
ttccagggaagaaccaagattcaaa

SEQ ID NO: 5672 - DNA, 25 bp, synthetic construct
  source 1..25: mol_type = other DNA; mol_type = other DNA
cttccagggaagaaccaaggttcag

SEQ ID NO: 5673 - DNA, 25 bp, synthetic construct
  source 1..25: mol_type = other DNA; mol_type = other DNA
cttccagggaagaaccaaggttcaa

SEQ ID NO: 5674 - DNA, 25 bp, synthetic construct
  source 1..25: mol_type = other DNA; mol_type = other DNA
cttccagggaagaaccaagattcaa

SEQ ID NO: 5675 - DNA, 25 bp, synthetic construct
  source 1..25: mol_type = other DNA; mol_type = other DNA
ccttccagggaagaaccaagattca

SEQ ID NO: 5676 - DNA, 25 bp, synthetic construct
  source 1..25: mol_type = other DNA; mol_type = other DNA
ccttccagggaagaaccaaaattca

SEQ ID NO: 5677 - DNA, 25 bp, synthetic construct
  source 1..25: mol_type = other DNA; mol_type = other DNA
ccccagctgctccttctccagttcg

SEQ ID NO: 5678 - DNA, 25 bp, synthetic construct
  source 1..25: mol_type = other DNA; mol_type = other DNA
ccccagctgctccttctccagttca

SEQ ID NO: 5679 - DNA, 25 bp, synthetic construct
  source 1..25: mol_type = other DNA; mol_type = other DNA
ccccagctgctccttctccaattca

SEQ ID NO: 5680 - DNA, 25 bp, synthetic construct
  source 1..25: mol_type = other DNA; mol_type = other DNA
gccccagctgctccttctccaattc

SEQ ID NO: 5681 - DNA, 25 bp, synthetic construct
  source 1..25: mol_type = other DNA; mol_type = other DNA
gccccagctactccttctccaattc

SEQ ID NO: 5682 - DNA, 25 bp, synthetic construct
  source 1..25: mol_type = other DNA; mol_type = other DNA
agccccagctgctccttctccagtt

SEQ ID NO: 5683 - DNA, 25 bp, synthetic construct
  source 1..25: mol_type = other DNA; mol_type = other DNA
agccccagctgctccttctccaatt

SEQ ID NO: 5684 - DNA, 25 bp, synthetic construct
  source 1..25: mol_type = other DNA; mol_type = other DNA
agccccagctactccttctccaatt

SEQ ID NO: 5685 - DNA, 25 bp, synthetic construct
  source 1..25: mol_type = other DNA; mol_type = other DNA
cagccccagctgctccttctccagt

SEQ ID NO: 5686 - DNA, 25 bp, synthetic construct
  source 1..25: mol_type = other DNA; mol_type = other DNA
cagccccagctgctccttctccaat

SEQ ID NO: 5687 - DNA, 25 bp, synthetic construct
  source 1..25: mol_type = other DNA; mol_type = other DNA
cagccccagctactccttctccaat

SEQ ID NO: 5688 - DNA, 25 bp, synthetic construct
  source 1..25: mol_type = other DNA; mol_type = other DNA
ccagccccagctgctccttctccaa

SEQ ID NO: 5689 - DNA, 25 bp, synthetic construct
  source 1..25: mol_type = other DNA; mol_type = other DNA
ccagccccagctactccttctccaa

SEQ ID NO: 5690 - DNA, 25 bp, synthetic construct
  source 1..25: mol_type = other DNA; mol_type = other DNA
gccagccccagctgctccttctcca

SEQ ID NO: 5691 - DNA, 25 bp, synthetic construct
  source 1..25: mol_type = other DNA; mol_type = other DNA
gccagccccagctactccttctcca

SEQ ID NO: 5692 - DNA, 25 bp, synthetic construct
  source 1..25: mol_type = other DNA; mol_type = other DNA
gccagccccaactactccttctcca

SEQ ID NO: 5693 - DNA, 25 bp, synthetic construct
  source 1..25: mol_type = other DNA; mol_type = other DNA
agccagccccagctgctccttctcc

SEQ ID NO: 5694 - DNA, 25 bp, synthetic construct
  source 1..25: mol_type = other DNA; mol_type = other DNA
agccagccccagctactccttctcc

SEQ ID NO: 5695 - DNA, 25 bp, synthetic construct
  source 1..25: mol_type = other DNA; mol_type = other DNA
agccagccccaactactccttctcc

SEQ ID NO: 5696 - DNA, 25 bp, synthetic construct
  source 1..25: mol_type = other DNA; mol_type = other DNA
cagccagccccagctactccttctc

SEQ ID NO: 5697 - DNA, 25 bp, synthetic construct
  source 1..25: mol_type = other DNA; mol_type = other DNA
cagccagccccaactactccttctc

SEQ ID NO: 5698 - DNA, 25 bp, synthetic construct
  source 1..25: mol_type = other DNA; mol_type = other DNA
ccagccagccccagctgctccttct

SEQ ID NO: 5699 - DNA, 25 bp, synthetic construct
  source 1..25: mol_type = other DNA; mol_type = other DNA
ccagccagccccagctactccttct

SEQ ID NO: 5700 - DNA, 25 bp, synthetic construct
  source 1..25: mol_type = other DNA; mol_type = other DNA
ccagccagccccaactactccttct

SEQ ID NO: 5701 - DNA, 25 bp, synthetic construct
  source 1..25: mol_type = other DNA; mol_type = other DNA
gccagccagccccagctgctccttc

SEQ ID NO: 5702 - DNA, 25 bp, synthetic construct
  source 1..25: mol_type = other DNA; mol_type = other DNA
gccagccagccccagctactccttc

SEQ ID NO: 5703 - DNA, 25 bp, synthetic construct
  source 1..25: mol_type = other DNA; mol_type = other DNA
gccagccagccccaactactccttc

SEQ ID NO: 5704 - DNA, 25 bp, synthetic construct
  source 1..25: mol_type = other DNA; mol_type = other DNA
cgccagccagccccagctactcctt

SEQ ID NO: 5705 - DNA, 25 bp, synthetic construct
  source 1..25: mol_type = other DNA; mol_type = other DNA
cgccagccagccccaactactcctt

SEQ ID NO: 5706 - DNA, 25 bp, synthetic construct
  source 1..25: mol_type = other DNA; mol_type = other DNA
tcgccagccagccccagctgctcct

SEQ ID NO: 5707 - DNA, 25 bp, synthetic construct
  source 1..25: mol_type = other DNA; mol_type = other DNA
tcgccagccagccccagctactcct

SEQ ID NO: 5708 - DNA, 25 bp, synthetic construct
  source 1..25: mol_type = other DNA; mol_type = other DNA
tcgccagccagccccaactactcct

SEQ ID NO: 5709 - DNA, 25 bp, synthetic construct
  source 1..25: mol_type = other DNA; mol_type = other DNA
ctcgccagccagccccagctgctcc

SEQ ID NO: 5710 - DNA, 25 bp, synthetic construct
  source 1..25: mol_type = other DNA; mol_type = other DNA
ctcgccagccagccccagctactcc

SEQ ID NO: 5711 - DNA, 25 bp, synthetic construct
  source 1..25: mol_type = other DNA; mol_type = other DNA
ctcgccagccagccccaactactcc

SEQ ID NO: 5712 - DNA, 25 bp, synthetic construct
  source 1..25: mol_type = other DNA; mol_type = other DNA
cctcgccagccagccccagctactc

SEQ ID NO: 5713 - DNA, 25 bp, synthetic construct
  source 1..25: mol_type = other DNA; mol_type = other DNA
cctcgccagccagccccaactactc

SEQ ID NO: 5714 - DNA, 25 bp, synthetic construct
  source 1..25: mol_type = other DNA; mol_type = other DNA
gcctcgccagccagccccagctgct

SEQ ID NO: 5715 - DNA, 25 bp, synthetic construct
  source 1..25: mol_type = other DNA; mol_type = other DNA
gcctcgccagccagccccagctact

SEQ ID NO: 5716 - DNA, 25 bp, synthetic construct
  source 1..25: mol_type = other DNA; mol_type = other DNA
gcctcgccagccagccccaactact

SEQ ID NO: 5717 - DNA, 25 bp, synthetic construct
  source 1..25: mol_type = other DNA; mol_type = other DNA
tgcctcgccagccagccccagctgc

SEQ ID NO: 5718 - DNA, 25 bp, synthetic construct
  source 1..25: mol_type = other DNA; mol_type = other DNA
tgcctcgccagccagccccagctac

SEQ ID NO: 5719 - DNA, 25 bp, synthetic construct
  source 1..25: mol_type = other DNA; mol_type = other DNA
tgcctcgccagccagccccaactac

SEQ ID NO: 5720 - DNA, 25 bp, synthetic construct
  source 1..25: mol_type = other DNA; mol_type = other DNA
ttgcctcgccagccagccccagcta

SEQ ID NO: 5721 - DNA, 25 bp, synthetic construct
  source 1..25: mol_type = other DNA; mol_type = other DNA
ttgcctcgccagccagccccaacta

SEQ ID NO: 5722 - DNA, 25 bp, synthetic construct
  source 1..25: mol_type = other DNA; mol_type = other DNA
tttgcctcgccagccagccccagct

SEQ ID NO: 5723 - DNA, 25 bp, synthetic construct
  source 1..25: mol_type = other DNA; mol_type = other DNA
tttgcctcgccagccagccccaact

SEQ ID NO: 5724 - DNA, 25 bp, synthetic construct
  source 1..25: mol_type = other DNA; mol_type = other DNA
tttgcctcgccagccaaccccaact

SEQ ID NO: 5725 - DNA, 25 bp, synthetic construct
  source 1..25: mol_type = other DNA; mol_type = other DNA
ctttgcctcgccagccagccccagc

SEQ ID NO: 5726 - DNA, 25 bp, synthetic construct
  source 1..25: mol_type = other DNA; mol_type = other DNA
ctttgcctcgccagccagccccaac

SEQ ID NO: 5727 - DNA, 25 bp, synthetic construct
  source 1..25: mol_type = other DNA; mol_type = other DNA
ctttgcctcgccagccaaccccaac

SEQ ID NO: 5728 - DNA, 25 bp, synthetic construct
  source 1..25: mol_type = other DNA; mol_type = other DNA
gctttgcctcgccagccagccccaa

SEQ ID NO: 5729 - DNA, 25 bp, synthetic construct
  source 1..25: mol_type = other DNA; mol_type = other DNA
gctttgcctcgccagccaaccccaa

SEQ ID NO: 5730 - DNA, 25 bp, synthetic construct
  source 1..25: mol_type = other DNA; mol_type = other DNA
agctttgcctcgccagccagcccca

SEQ ID NO: 5731 - DNA, 25 bp, synthetic construct
  source 1..25: mol_type = other DNA; mol_type = other DNA
agctttgcctcgccagccaacccca

SEQ ID NO: 5732 - DNA, 25 bp, synthetic construct
  source 1..25: mol_type = other DNA; mol_type = other DNA
agctttgcctcgccaaccaacccca

SEQ ID NO: 5733 - DNA, 25 bp, synthetic construct
  source 1..25: mol_type = other DNA; mol_type = other DNA
cagctttgcctcgccagccagcccc

SEQ ID NO: 5734 - DNA, 25 bp, synthetic construct
  source 1..25: mol_type = other DNA; mol_type = other DNA
cagctttgcctcgccagccaacccc

SEQ ID NO: 5735 - DNA, 25 bp, synthetic construct
  source 1..25: mol_type = other DNA; mol_type = other DNA
cagctttgcctcgccaaccaacccc

SEQ ID NO: 5736 - DNA, 25 bp, synthetic construct
  source 1..25: mol_type = other DNA; mol_type = other DNA
ccagctttgcctcgccagccaaccc

SEQ ID NO: 5737 - DNA, 25 bp, synthetic construct
  source 1..25: mol_type = other DNA; mol_type = other DNA
ccagctttgcctcgccaaccaaccc

SEQ ID NO: 5738 - DNA, 25 bp, synthetic construct
  source 1..25: mol_type = other DNA; mol_type = other DNA
accagctttgcctcgccagccagcc

SEQ ID NO: 5739 - DNA, 25 bp, synthetic construct
  source 1..25: mol_type = other DNA; mol_type = other DNA
accagctttgcctcgccagccaacc

SEQ ID NO: 5740 - DNA, 25 bp, synthetic construct
  source 1..25: mol_type = other DNA; mol_type = other DNA
accagctttgcctcgccaaccaacc

SEQ ID NO: 5741 - DNA, 25 bp, synthetic construct
  source 1..25: mol_type = other DNA; mol_type = other DNA
caccagctttgcctcgccagccagc

SEQ ID NO: 5742 - DNA, 25 bp, synthetic construct
  source 1..25: mol_type = other DNA; mol_type = other DNA
caccagctttgcctcgccagccaac

SEQ ID NO: 5743 - DNA, 25 bp, synthetic construct
  source 1..25: mol_type = other DNA; mol_type = other DNA
caccagctttgcctcgccaaccaac

SEQ ID NO: 5744 - DNA, 25 bp, synthetic construct
  source 1..25: mol_type = other DNA; mol_type = other DNA
gcaccagctttgcctcgccagccaa

SEQ ID NO: 5745 - DNA, 25 bp, synthetic construct
  source 1..25: mol_type = other DNA; mol_type = other DNA
gcaccagctttgcctcgccaaccaa

SEQ ID NO: 5746 - DNA, 25 bp, synthetic construct
  source 1..25: mol_type = other DNA; mol_type = other DNA
agcaccagctttgcctcgccagcca

SEQ ID NO: 5747 - DNA, 25 bp, synthetic construct
  source 1..25: mol_type = other DNA; mol_type = other DNA
agcaccagctttgcctcgccaacca

SEQ ID NO: 5748 - DNA, 25 bp, synthetic construct
  source 1..25: mol_type = other DNA; mol_type = other DNA
agcaccagctttgcctcaccaacca

SEQ ID NO: 5749 - DNA, 25 bp, synthetic construct
  source 1..25: mol_type = other DNA; mol_type = other DNA
cagcaccagctttgcctcgccagcc

SEQ ID NO: 5750 - DNA, 25 bp, synthetic construct
  source 1..25: mol_type = other DNA; mol_type = other DNA
cagcaccagctttgcctcgccaacc

SEQ ID NO: 5751 - DNA, 25 bp, synthetic construct
  source 1..25: mol_type = other DNA; mol_type = other DNA
cagcaccagctttgcctcaccaacc

SEQ ID NO: 5752 - DNA, 25 bp, synthetic construct
  source 1..25: mol_type = other DNA; mol_type = other DNA
gcagcaccagctttgcctcgccaac

SEQ ID NO: 5753 - DNA, 25 bp, synthetic construct
  source 1..25: mol_type = other DNA; mol_type = other DNA
gcagcaccagctttgcctcaccaac

SEQ ID NO: 5754 - DNA, 25 bp, synthetic construct
  source 1..25: mol_type = other DNA; mol_type = other DNA
agcagcaccagctttgcctcgccag

SEQ ID NO: 5755 - DNA, 25 bp, synthetic construct
  source 1..25: mol_type = other DNA; mol_type = other DNA
agcagcaccagctttgcctcgccaa

SEQ ID NO: 5756 - DNA, 25 bp, synthetic construct
  source 1..25: mol_type = other DNA; mol_type = other DNA
agcagcaccagctttgcctcaccaa

SEQ ID NO: 5757 - DNA, 25 bp, synthetic construct
  source 1..25: mol_type = other DNA; mol_type = other DNA
gagcagcaccagctttgcctcgcca

SEQ ID NO: 5758 - DNA, 25 bp, synthetic construct
  source 1..25: mol_type = other DNA; mol_type = other DNA
gagcagcaccagctttgcctcacca

SEQ ID NO: 5759 - DNA, 25 bp, synthetic construct
  source 1..25: mol_type = other DNA; mol_type = other DNA
gagcagcaccagctttacctcacca

SEQ ID NO: 5760 - DNA, 25 bp, synthetic construct
  source 1..25: mol_type = other DNA; mol_type = other DNA
tgagcagcaccagctttgcctcacc

SEQ ID NO: 5761 - DNA, 25 bp, synthetic construct
  source 1..25: mol_type = other DNA; mol_type = other DNA
tgagcagcaccagctttacctcacc

SEQ ID NO: 5762 - DNA, 25 bp, synthetic construct
  source 1..25: mol_type = other DNA; mol_type = other DNA
ctgagcagcaccagctttgcctcgc

SEQ ID NO: 5763 - DNA, 25 bp, synthetic construct
  source 1..25: mol_type = other DNA; mol_type = other DNA
ctgagcagcaccagctttgcctcac

SEQ ID NO: 5764 - DNA, 25 bp, synthetic construct
  source 1..25: mol_type = other DNA; mol_type = other DNA
ctgagcagcaccagctttacctcac

SEQ ID NO: 5765 - DNA, 25 bp, synthetic construct
  source 1..25: mol_type = other DNA; mol_type = other DNA
gctgagcagcaccagctttgcctcg

SEQ ID NO: 5766 - DNA, 25 bp, synthetic construct
  source 1..25: mol_type = other DNA; mol_type = other DNA
gctgagcagcaccagctttgcctca

SEQ ID NO: 5767 - DNA, 25 bp, synthetic construct
  source 1..25: mol_type = other DNA; mol_type = other DNA
gctgagcagcaccagctttacctca

SEQ ID NO: 5768 - DNA, 25 bp, synthetic construct
  source 1..25: mol_type = other DNA; mol_type = other DNA
ggctgagcagcaccagctttacctc

SEQ ID NO: 5769 - DNA, 25 bp, synthetic construct
  source 1..25: mol_type = other DNA; mol_type = other DNA
ggctgagcagcaccaactttacctc

SEQ ID NO: 5770 - DNA, 25 bp, synthetic construct
  source 1..25: mol_type = other DNA; mol_type = other DNA
gggctgagcagcaccagctttgcct

SEQ ID NO: 5771 - DNA, 25 bp, synthetic construct
  source 1..25: mol_type = other DNA; mol_type = other DNA
gggctgagcagcaccagctttacct

SEQ ID NO: 5772 - DNA, 25 bp, synthetic construct
  source 1..25: mol_type = other DNA; mol_type = other DNA
gggctgagcagcaccaactttacct

SEQ ID NO: 5773 - DNA, 25 bp, synthetic construct
  source 1..25: mol_type = other DNA; mol_type = other DNA
agggctgagcagcaccagctttgcc

SEQ ID NO: 5774 - DNA, 25 bp, synthetic construct
  source 1..25: mol_type = other DNA; mol_type = other DNA
gaggctgagcagcaccagctttgcc

SEQ ID NO: 5775 - DNA, 25 bp, synthetic construct
  source 1..25: mol_type = other DNA; mol_type = other DNA
ggagctgagcagcaccagctttgcc

SEQ ID NO: 5776 - DNA, 25 bp, synthetic construct
  source 1..25: mol_type = other DNA; mol_type = other DNA
gggactgagcagcaccagctttgcc

SEQ ID NO: 5777 - DNA, 25 bp, synthetic construct
  source 1..25: mol_type = other DNA; mol_type = other DNA
agagctgagcagcaccagctttgcc

SEQ ID NO: 5778 - DNA, 25 bp, synthetic construct
  source 1..25: mol_type = other DNA; mol_type = other DNA
aggactgagcagcaccagctttgcc

SEQ ID NO: 5779 - DNA, 25 bp, synthetic construct
  source 1..25: mol_type = other DNA; mol_type = other DNA
gaagctgagcagcaccagctttgcc

SEQ ID NO: 5780 - DNA, 25 bp, synthetic construct
  source 1..25: mol_type = other DNA; mol_type = other DNA
gagactgagcagcaccagctttgcc

SEQ ID NO: 5781 - DNA, 25 bp, synthetic construct
  source 1..25: mol_type = other DNA; mol_type = other DNA
atgggctgagcagcaccagctttgc

SEQ ID NO: 5782 - DNA, 25 bp, synthetic construct
  source 1..25: mol_type = other DNA; mol_type = other DNA
agtggctgagcagcaccagctttgc

SEQ ID NO: 5783 - DNA, 25 bp, synthetic construct
  source 1..25: mol_type = other DNA; mol_type = other DNA
aggtgctgagcagcaccagctttgc

SEQ ID NO: 5784 - DNA, 25 bp, synthetic construct
  source 1..25: mol_type = other DNA; mol_type = other DNA
agggtctgagcagcaccagctttgc

SEQ ID NO: 5785 - DNA, 25 bp, synthetic construct
  source 1..25: mol_type = other DNA; mol_type = other DNA
aagagctgagcagcaccagctttgc

SEQ ID NO: 5786 - DNA, 25 bp, synthetic construct
  source 1..25: mol_type = other DNA; mol_type = other DNA
aaggactgagcagcaccagctttgc

SEQ ID NO: 5787 - DNA, 25 bp, synthetic construct
  source 1..25: mol_type = other DNA; mol_type = other DNA
agaagctgagcagcaccagctttgc

SEQ ID NO: 5788 - DNA, 25 bp, synthetic construct
  source 1..25: mol_type = other DNA; mol_type = other DNA
agagactgagcagcaccagctttgc

SEQ ID NO: 5789 - DNA, 25 bp, synthetic construct
  source 1..25: mol_type = other DNA; mol_type = other DNA
gatgggctgagcagcaccagctttg

SEQ ID NO: 5790 - DNA, 25 bp, synthetic construct
  source 1..25: mol_type = other DNA; mol_type = other DNA
gagtggctgagcagcaccagctttg

SEQ ID NO: 5791 - DNA, 25 bp, synthetic construct
  source 1..25: mol_type = other DNA; mol_type = other DNA
gaggtgctgagcagcaccagctttg

SEQ ID NO: 5792 - DNA, 25 bp, synthetic construct
  source 1..25: mol_type = other DNA; mol_type = other DNA
gagggtctgagcagcaccagctttg

SEQ ID NO: 5793 - DNA, 25 bp, synthetic construct
  source 1..25: mol_type = other DNA; mol_type = other DNA
gaagagctgagcagcaccagctttg

SEQ ID NO: 5794 - DNA, 25 bp, synthetic construct
  source 1..25: mol_type = other DNA; mol_type = other DNA
gaaggactgagcagcaccagctttg

SEQ ID NO: 5795 - DNA, 25 bp, synthetic construct
  source 1..25: mol_type = other DNA; mol_type = other DNA
gagaagctgagcagcaccagctttg

SEQ ID NO: 5796 - DNA, 25 bp, synthetic construct
  source 1..25: mol_type = other DNA; mol_type = other DNA
gagagactgagcagcaccagctttg

SEQ ID NO: 5797 - DNA, 25 bp, synthetic construct
  source 1..25: mol_type = other DNA; mol_type = other DNA
ggatgggctgagcagcaccagcttt

SEQ ID NO: 5798 - DNA, 25 bp, synthetic construct
  source 1..25: mol_type = other DNA; mol_type = other DNA
ggagtggctgagcagcaccagcttt

SEQ ID NO: 5799 - DNA, 25 bp, synthetic construct
  source 1..25: mol_type = other DNA; mol_type = other DNA
ggaggtgctgagcagcaccagcttt

SEQ ID NO: 5800 - DNA, 25 bp, synthetic construct
  source 1..25: mol_type = other DNA; mol_type = other DNA
ggagggtctgagcagcaccagcttt

SEQ ID NO: 5801 - DNA, 25 bp, synthetic construct
  source 1..25: mol_type = other DNA; mol_type = other DNA
agaggagctgagcagcaccagcttt

SEQ ID NO: 5802 - DNA, 25 bp, synthetic construct
  source 1..25: mol_type = other DNA; mol_type = other DNA
ggaagagctgagcagcaccagcttt

SEQ ID NO: 5803 - DNA, 25 bp, synthetic construct
  source 1..25: mol_type = other DNA; mol_type = other DNA
ggagaagctgagcagcaccagcttt

SEQ ID NO: 5804 - DNA, 25 bp, synthetic construct
  source 1..25: mol_type = other DNA; mol_type = other DNA
ggagagactgagcagcaccagcttt

SEQ ID NO: 5805 - DNA, 25 bp, synthetic construct
  source 1..25: mol_type = other DNA; mol_type = other DNA
gggatgggctgagcagcaccagctt

SEQ ID NO: 5806 - DNA, 25 bp, synthetic construct
  source 1..25: mol_type = other DNA; mol_type = other DNA
gggagtggctgagcagcaccagctt

SEQ ID NO: 5807 - DNA, 25 bp, synthetic construct
  source 1..25: mol_type = other DNA; mol_type = other DNA
gggaggtgctgagcagcaccagctt

SEQ ID NO: 5808 - DNA, 25 bp, synthetic construct
  source 1..25: mol_type = other DNA; mol_type = other DNA
gggagggtctgagcagcaccagctt

SEQ ID NO: 5809 - DNA, 25 bp, synthetic construct
  source 1..25: mol_type = other DNA; mol_type = other DNA
ggaagaggctgagcagcaccagctt

SEQ ID NO: 5810 - DNA, 25 bp, synthetic construct
  source 1..25: mol_type = other DNA; mol_type = other DNA
gggaagagctgagcagcaccagctt

SEQ ID NO: 5811 - DNA, 25 bp, synthetic construct
  source 1..25: mol_type = other DNA; mol_type = other DNA
gggagaagctgagcagcaccagctt

SEQ ID NO: 5812 - DNA, 25 bp, synthetic construct
  source 1..25: mol_type = other DNA; mol_type = other DNA
gggagagactgagcagcaccagctt

SEQ ID NO: 5813 - DNA, 25 bp, synthetic construct
  source 1..25: mol_type = other DNA; mol_type = other DNA
agggatgggctgagcagcaccagct

SEQ ID NO: 5814 - DNA, 25 bp, synthetic construct
  source 1..25: mol_type = other DNA; mol_type = other DNA
agggagtggctgagcagcaccagct

SEQ ID NO: 5815 - DNA, 25 bp, synthetic construct
  source 1..25: mol_type = other DNA; mol_type = other DNA
agggaggtgctgagcagcaccagct

SEQ ID NO: 5816 - DNA, 25 bp, synthetic construct
  source 1..25: mol_type = other DNA; mol_type = other DNA
agggagggtctgagcagcaccagct

SEQ ID NO: 5817 - DNA, 25 bp, synthetic construct
  source 1..25: mol_type = other DNA; mol_type = other DNA
aaggagaggctgagcagcaccagct

SEQ ID NO: 5818 - DNA, 25 bp, synthetic construct
  source 1..25: mol_type = other DNA; mol_type = other DNA
aaggaggagctgagcagcaccagct

SEQ ID NO: 5819 - DNA, 25 bp, synthetic construct
  source 1..25: mol_type = other DNA; mol_type = other DNA
agagagaggctgagcagcaccagct

SEQ ID NO: 5820 - DNA, 25 bp, synthetic construct
  source 1..25: mol_type = other DNA; mol_type = other DNA
agagaggagctgagcagcaccagct

SEQ ID NO: 5821 - DNA, 25 bp, synthetic construct
  source 1..25: mol_type = other DNA; mol_type = other DNA
cagggatgggctgagcagcaccagc

SEQ ID NO: 5822 - DNA, 25 bp, synthetic construct
  source 1..25: mol_type = other DNA; mol_type = other DNA
cagggagtggctgagcagcaccagc

SEQ ID NO: 5823 - DNA, 25 bp, synthetic construct
  source 1..25: mol_type = other DNA; mol_type = other DNA
cagggaggtgctgagcagcaccagc

SEQ ID NO: 5824 - DNA, 25 bp, synthetic construct
  source 1..25: mol_type = other DNA; mol_type = other DNA
cagggagggtctgagcagcaccagc

SEQ ID NO: 5825 - DNA, 25 bp, synthetic construct
  source 1..25: mol_type = other DNA; mol_type = other DNA
caaggagaggctgagcagcaccagc

SEQ ID NO: 5826 - DNA, 25 bp, synthetic construct
  source 1..25: mol_type = other DNA; mol_type = other DNA
caaggaggagctgagcagcaccagc

SEQ ID NO: 5827 - DNA, 25 bp, synthetic construct
  source 1..25: mol_type = other DNA; mol_type = other DNA
cagagagaggctgagcagcaccagc

SEQ ID NO: 5828 - DNA, 25 bp, synthetic construct
  source 1..25: mol_type = other DNA; mol_type = other DNA
cagagaggagctgagcagcaccagc

SEQ ID NO: 5829 - DNA, 25 bp, synthetic construct
  source 1..25: mol_type = other DNA; mol_type = other DNA
gcagggatgggctgagcagcaccag

SEQ ID NO: 5830 - DNA, 25 bp, synthetic construct
  source 1..25: mol_type = other DNA; mol_type = other DNA
gcagggagtggctgagcagcaccag

SEQ ID NO: 5831 - DNA, 25 bp, synthetic construct
  source 1..25: mol_type = other DNA; mol_type = other DNA
gcagggaggtgctgagcagcaccag

SEQ ID NO: 5832 - DNA, 25 bp, synthetic construct
  source 1..25: mol_type = other DNA; mol_type = other DNA
gcagggagggtctgagcagcaccag

SEQ ID NO: 5833 - DNA, 25 bp, synthetic construct
  source 1..25: mol_type = other DNA; mol_type = other DNA
gcaaggagaggctgagcagcaccag

SEQ ID NO: 5834 - DNA, 25 bp, synthetic construct
  source 1..25: mol_type = other DNA; mol_type = other DNA
gcaaggaggagctgagcagcaccag

SEQ ID NO: 5835 - DNA, 25 bp, synthetic construct
  source 1..25: mol_type = other DNA; mol_type = other DNA
gcagagagaggctgagcagcaccag

SEQ ID NO: 5836 - DNA, 25 bp, synthetic construct
  source 1..25: mol_type = other DNA; mol_type = other DNA
gcagagaggagctgagcagcaccag

SEQ ID NO: 5837 - DNA, 25 bp, synthetic construct
  source 1..25: mol_type = other DNA; mol_type = other DNA
agcagggatgggctgagcagcacca

SEQ ID NO: 5838 - DNA, 25 bp, synthetic construct
  source 1..25: mol_type = other DNA; mol_type = other DNA
agcagggagtggctgagcagcacca

SEQ ID NO: 5839 - DNA, 25 bp, synthetic construct
  source 1..25: mol_type = other DNA; mol_type = other DNA
agcagggaggtgctgagcagcacca

SEQ ID NO: 5840 - DNA, 25 bp, synthetic construct
  source 1..25: mol_type = other DNA; mol_type = other DNA
agcagggagggtctgagcagcacca

SEQ ID NO: 5841 - DNA, 25 bp, synthetic construct
  source 1..25: mol_type = other DNA; mol_type = other DNA
agcaaggagaggctgagcagcacca

SEQ ID NO: 5842 - DNA, 25 bp, synthetic construct
  source 1..25: mol_type = other DNA; mol_type = other DNA
agcaaggaggagctgagcagcacca

SEQ ID NO: 5843 - DNA, 25 bp, synthetic construct
  source 1..25: mol_type = other DNA; mol_type = other DNA
agcagagagaggctgagcagcacca

SEQ ID NO: 5844 - DNA, 25 bp, synthetic construct
  source 1..25: mol_type = other DNA; mol_type = other DNA
agcagagaggagctgagcagcacca

SEQ ID NO: 5845 - DNA, 25 bp, synthetic construct
  source 1..25: mol_type = other DNA; mol_type = other DNA
gagcagggatgggctgagcagcacc

SEQ ID NO: 5846 - DNA, 25 bp, synthetic construct
  source 1..25: mol_type = other DNA; mol_type = other DNA
gagcagggagtggctgagcagcacc

SEQ ID NO: 5847 - DNA, 25 bp, synthetic construct
  source 1..25: mol_type = other DNA; mol_type = other DNA
gagcagggaggtgctgagcagcacc

SEQ ID NO: 5848 - DNA, 25 bp, synthetic construct
  source 1..25: mol_type = other DNA; mol_type = other DNA
gagcagggagggtctgagcagcacc

SEQ ID NO: 5849 - DNA, 25 bp, synthetic construct
  source 1..25: mol_type = other DNA; mol_type = other DNA
gagcaaggagaggctgagcagcacc

SEQ ID NO: 5850 - DNA, 25 bp, synthetic construct
  source 1..25: mol_type = other DNA; mol_type = other DNA
gagcaaggaggagctgagcagcacc

SEQ ID NO: 5851 - DNA, 25 bp, synthetic construct
  source 1..25: mol_type = other DNA; mol_type = other DNA
gagcagagagaggctgagcagcacc

SEQ ID NO: 5852 - DNA, 25 bp, synthetic construct
  source 1..25: mol_type = other DNA; mol_type = other DNA
gagcagagaggagctgagcagcacc

SEQ ID NO: 5853 - DNA, 25 bp, synthetic construct
  source 1..25: mol_type = other DNA; mol_type = other DNA
ggagcagggatgggctgagcagcac

SEQ ID NO: 5854 - DNA, 25 bp, synthetic construct
  source 1..25: mol_type = other DNA; mol_type = other DNA
ggagcagggagtggctgagcagcac

SEQ ID NO: 5855 - DNA, 25 bp, synthetic construct
  source 1..25: mol_type = other DNA; mol_type = other DNA
ggagcagggaggtgctgagcagcac

SEQ ID NO: 5856 - DNA, 25 bp, synthetic construct
  source 1..25: mol_type = other DNA; mol_type = other DNA
ggagcagggagggtctgagcagcac

SEQ ID NO: 5857 - DNA, 25 bp, synthetic construct
  source 1..25: mol_type = other DNA; mol_type = other DNA
ggagcaaggagaggctgagcagcac

SEQ ID NO: 5858 - DNA, 25 bp, synthetic construct
  source 1..25: mol_type = other DNA; mol_type = other DNA
ggagcaaggaggagctgagcagcac

SEQ ID NO: 5859 - DNA, 25 bp, synthetic construct
  source 1..25: mol_type = other DNA; mol_type = other DNA
ggagcagagagaggctgagcagcac

SEQ ID NO: 5860 - DNA, 25 bp, synthetic construct
  source 1..25: mol_type = other DNA; mol_type = other DNA
ggagcagagaggagctgagcagcac

SEQ ID NO: 5861 - DNA, 25 bp, synthetic construct
  source 1..25: mol_type = other DNA; mol_type = other DNA
aggagcagggatgggctgagcagca

SEQ ID NO: 5862 - DNA, 25 bp, synthetic construct
  source 1..25: mol_type = other DNA; mol_type = other DNA
aggagcagggagtggctgagcagca

SEQ ID NO: 5863 - DNA, 25 bp, synthetic construct
  source 1..25: mol_type = other DNA; mol_type = other DNA
aggagcagggaggtgctgagcagca

SEQ ID NO: 5864 - DNA, 25 bp, synthetic construct
  source 1..25: mol_type = other DNA; mol_type = other DNA
aggagcagggagggtctgagcagca

SEQ ID NO: 5865 - DNA, 25 bp, synthetic construct
  source 1..25: mol_type = other DNA; mol_type = other DNA
aggagcaaggagaggctgagcagca

SEQ ID NO: 5866 - DNA, 25 bp, synthetic construct
  source 1..25: mol_type = other DNA; mol_type = other DNA
aggagcaaggaggagctgagcagca

SEQ ID NO: 5867 - DNA, 25 bp, synthetic construct
  source 1..25: mol_type = other DNA; mol_type = other DNA
aggagcagagagaggctgagcagca

SEQ ID NO: 5868 - DNA, 25 bp, synthetic construct
  source 1..25: mol_type = other DNA; mol_type = other DNA
aggagcagagaggagctgagcagca

SEQ ID NO: 5869 - DNA, 25 bp, synthetic construct
  source 1..25: mol_type = other DNA; mol_type = other DNA
gaggagcagggatgggctgagcagc

SEQ ID NO: 5870 - DNA, 25 bp, synthetic construct
  source 1..25: mol_type = other DNA; mol_type = other DNA
gaggagcagggagtggctgagcagc

SEQ ID NO: 5871 - DNA, 25 bp, synthetic construct
  source 1..25: mol_type = other DNA; mol_type = other DNA
gaggagcagggaggtgctgagcagc

SEQ ID NO: 5872 - DNA, 25 bp, synthetic construct
  source 1..25: mol_type = other DNA; mol_type = other DNA
gaggagcagggagggtctgagcagc

SEQ ID NO: 5873 - DNA, 25 bp, synthetic construct
  source 1..25: mol_type = other DNA; mol_type = other DNA
gaggagcaaggagaggctgagcagc

SEQ ID NO: 5874 - DNA, 25 bp, synthetic construct
  source 1..25: mol_type = other DNA; mol_type = other DNA
gaggagcaaggaggagctgagcagc

SEQ ID NO: 5875 - DNA, 25 bp, synthetic construct
  source 1..25: mol_type = other DNA; mol_type = other DNA
gaggagcagagagaggctgagcagc

SEQ ID NO: 5876 - DNA, 25 bp, synthetic construct
  source 1..25: mol_type = other DNA; mol_type = other DNA
gaggagcagagaggagctgagcagc

SEQ ID NO: 5877 - DNA, 25 bp, synthetic construct
  source 1..25: mol_type = other DNA; mol_type = other DNA
tgaggagcagggatgggctgagcag

SEQ ID NO: 5878 - DNA, 25 bp, synthetic construct
  source 1..25: mol_type = other DNA; mol_type = other DNA
tgaggagcagggagtggctgagcag

SEQ ID NO: 5879 - DNA, 25 bp, synthetic construct
  source 1..25: mol_type = other DNA; mol_type = other DNA
tgaggagcagggaggtgctgagcag

SEQ ID NO: 5880 - DNA, 25 bp, synthetic construct
  source 1..25: mol_type = other DNA; mol_type = other DNA
tgaggagcagggagggtctgagcag

SEQ ID NO: 5881 - DNA, 25 bp, synthetic construct
  source 1..25: mol_type = other DNA; mol_type = other DNA
tgaggagcaaggagaggctgagcag

SEQ ID NO: 5882 - DNA, 25 bp, synthetic construct
  source 1..25: mol_type = other DNA; mol_type = other DNA
tgaggagcaaggaggagctgagcag

SEQ ID NO: 5883 - DNA, 25 bp, synthetic construct
  source 1..25: mol_type = other DNA; mol_type = other DNA
tgaggagcagagagaggctgagcag

SEQ ID NO: 5884 - DNA, 25 bp, synthetic construct
  source 1..25: mol_type = other DNA; mol_type = other DNA
tgaggagcagagaggagctgagcag

SEQ ID NO: 5885 - DNA, 25 bp, synthetic construct
  source 1..25: mol_type = other DNA; mol_type = other DNA
ttgaggagcagggatgggctgagca

SEQ ID NO: 5886 - DNA, 25 bp, synthetic construct
  source 1..25: mol_type = other DNA; mol_type = other DNA
ttgaggagcagggagtggctgagca

SEQ ID NO: 5887 - DNA, 25 bp, synthetic construct
  source 1..25: mol_type = other DNA; mol_type = other DNA
ttgaggagcagggaggtgctgagca

SEQ ID NO: 5888 - DNA, 25 bp, synthetic construct
  source 1..25: mol_type = other DNA; mol_type = other DNA
ttgaggagcagggagggtctgagca

SEQ ID NO: 5889 - DNA, 25 bp, synthetic construct
  source 1..25: mol_type = other DNA; mol_type = other DNA
ttgaggagcaaggagaggctgagca

SEQ ID NO: 5890 - DNA, 25 bp, synthetic construct
  source 1..25: mol_type = other DNA; mol_type = other DNA
ttgaggagcaaggaggagctgagca

SEQ ID NO: 5891 - DNA, 25 bp, synthetic construct
  source 1..25: mol_type = other DNA; mol_type = other DNA
ttgaggagcagagagaggctgagca

SEQ ID NO: 5892 - DNA, 25 bp, synthetic construct
  source 1..25: mol_type = other DNA; mol_type = other DNA
ttgaggagcagagaggagctgagca

SEQ ID NO: 5893 - DNA, 25 bp, synthetic construct
  source 1..25: mol_type = other DNA; mol_type = other DNA
cttgaggagcagggatgggctgagc

SEQ ID NO: 5894 - DNA, 25 bp, synthetic construct
  source 1..25: mol_type = other DNA; mol_type = other DNA
cttgaggagcagggagtggctgagc

SEQ ID NO: 5895 - DNA, 25 bp, synthetic construct
  source 1..25: mol_type = other DNA; mol_type = other DNA
cttgaggagcagggaggtgctgagc

SEQ ID NO: 5896 - DNA, 25 bp, synthetic construct
  source 1..25: mol_type = other DNA; mol_type = other DNA
cttgaggagcagggagggtctgagc

SEQ ID NO: 5897 - DNA, 25 bp, synthetic construct
  source 1..25: mol_type = other DNA; mol_type = other DNA
cttgaggagcaaggagaggctgagc

SEQ ID NO: 5898 - DNA, 25 bp, synthetic construct
  source 1..25: mol_type = other DNA; mol_type = other DNA
cttgaggagcaaggaggagctgagc

SEQ ID NO: 5899 - DNA, 25 bp, synthetic construct
  source 1..25: mol_type = other DNA; mol_type = other DNA
cttgaggagcagagagaggctgagc

SEQ ID NO: 5900 - DNA, 25 bp, synthetic construct
  source 1..25: mol_type = other DNA; mol_type = other DNA
cttgaggagcagagaggagctgagc

SEQ ID NO: 5901 - DNA, 25 bp, synthetic construct
  source 1..25: mol_type = other DNA; mol_type = other DNA
ccttgaggagcagggatgggctgag

SEQ ID NO: 5902 - DNA, 25 bp, synthetic construct
  source 1..25: mol_type = other DNA; mol_type = other DNA
ccttgaggagcagggagtggctgag

SEQ ID NO: 5903 - DNA, 25 bp, synthetic construct
  source 1..25: mol_type = other DNA; mol_type = other DNA
ccttgaggagcagggaggtgctgag

SEQ ID NO: 5904 - DNA, 25 bp, synthetic construct
  source 1..25: mol_type = other DNA; mol_type = other DNA
ccttgaggagcagggagggtctgag

SEQ ID NO: 5905 - DNA, 25 bp, synthetic construct
  source 1..25: mol_type = other DNA; mol_type = other DNA
ccttgaggagcaaggagaggctgag

SEQ ID NO: 5906 - DNA, 25 bp, synthetic construct
  source 1..25: mol_type = other DNA; mol_type = other DNA
ccttgaggagcaaggaggagctgag

SEQ ID NO: 5907 - DNA, 25 bp, synthetic construct
  source 1..25: mol_type = other DNA; mol_type = other DNA
ccttgaggagcagagagaggctgag

SEQ ID NO: 5908 - DNA, 25 bp, synthetic construct
  source 1..25: mol_type = other DNA; mol_type = other DNA
ccttgaggagcagagaggagctgag

SEQ ID NO: 5909 - DNA, 25 bp, synthetic construct
  source 1..25: mol_type = other DNA; mol_type = other DNA
gccttgaggagcagggagggactaa

SEQ ID NO: 5910 - DNA, 25 bp, synthetic construct
  source 1..25: mol_type = other DNA; mol_type = other DNA
gccttgaggagcagggatgggctga

SEQ ID NO: 5911 - DNA, 25 bp, synthetic construct
  source 1..25: mol_type = other DNA; mol_type = other DNA
gccttgaggagcagggagtggctga

SEQ ID NO: 5912 - DNA, 25 bp, synthetic construct
  source 1..25: mol_type = other DNA; mol_type = other DNA
gccttgaggagcagggaggtgctga

SEQ ID NO: 5913 - DNA, 25 bp, synthetic construct
  source 1..25: mol_type = other DNA; mol_type = other DNA
gccttgaggagcagggagggtctga

SEQ ID NO: 5914 - DNA, 25 bp, synthetic construct
  source 1..25: mol_type = other DNA; mol_type = other DNA
ggccttgaggagcagggagggacta

SEQ ID NO: 5915 - DNA, 25 bp, synthetic construct
  source 1..25: mol_type = other DNA; mol_type = other DNA
ggccttgaggagcagggatgggctg

SEQ ID NO: 5916 - DNA, 25 bp, synthetic construct
  source 1..25: mol_type = other DNA; mol_type = other DNA
ggccttgaggagcagggagtggctg

SEQ ID NO: 5917 - DNA, 25 bp, synthetic construct
  source 1..25: mol_type = other DNA; mol_type = other DNA
ggccttgaggagcagggaggtgctg

SEQ ID NO: 5918 - DNA, 25 bp, synthetic construct
  source 1..25: mol_type = other DNA; mol_type = other DNA
ggccttgaggagcagggagggtctg

SEQ ID NO: 5919 - DNA, 25 bp, synthetic construct
  source 1..25: mol_type = other DNA; mol_type = other DNA
aggccttgaggagcagggagggact

SEQ ID NO: 5920 - DNA, 25 bp, synthetic construct
  source 1..25: mol_type = other DNA; mol_type = other DNA
aggccttgaggagcagggaggaact

SEQ ID NO: 5921 - DNA, 25 bp, synthetic construct
  source 1..25: mol_type = other DNA; mol_type = other DNA
aaggccttgaggagcagggagggac

SEQ ID NO: 5922 - DNA, 25 bp, synthetic construct
  source 1..25: mol_type = other DNA; mol_type = other DNA
aaggccttgaggagcagggaggaac

SEQ ID NO: 5923 - DNA, 25 bp, synthetic construct
  source 1..25: mol_type = other DNA; mol_type = other DNA
caaggccttgaggagcagggaggga

SEQ ID NO: 5924 - DNA, 25 bp, synthetic construct
  source 1..25: mol_type = other DNA; mol_type = other DNA
caaggccttgaggagcagggaggaa

SEQ ID NO: 5925 - DNA, 25 bp, synthetic construct
  source 1..25: mol_type = other DNA; mol_type = other DNA
tcaaggccttgaggagcagggagga

SEQ ID NO: 5926 - DNA, 25 bp, synthetic construct
  source 1..25: mol_type = other DNA; mol_type = other DNA
tcaaggccttgaggagcagggagaa

SEQ ID NO: 5927 - DNA, 25 bp, synthetic construct
  source 1..25: mol_type = other DNA; mol_type = other DNA
gtcaaggccttgaggagcagggagg

SEQ ID NO: 5928 - DNA, 25 bp, synthetic construct
  source 1..25: mol_type = other DNA; mol_type = other DNA
gtcaaggccttgaggagcagggaga

SEQ ID NO: 5929 - DNA, 25 bp, synthetic construct
  source 1..25: mol_type = other DNA; mol_type = other DNA
gtcaaggccttgaggagcagggaaa

SEQ ID NO: 5930 - DNA, 25 bp, synthetic construct
  source 1..25: mol_type = other DNA; mol_type = other DNA
ggtcaaggccttgaggagcagggag

SEQ ID NO: 5931 - DNA, 25 bp, synthetic construct
  source 1..25: mol_type = other DNA; mol_type = other DNA
ggtcaaggccttgaggagcagggaa

SEQ ID NO: 5932 - DNA, 25 bp, synthetic construct
  source 1..25: mol_type = other DNA; mol_type = other DNA
ggtcaaggccttgaggagcaggaaa

SEQ ID NO: 5933 - DNA, 25 bp, synthetic construct
  source 1..25: mol_type = other DNA; mol_type = other DNA
aggtcaaggccttgaggagcaggaa

SEQ ID NO: 5934 - DNA, 25 bp, synthetic construct
  source 1..25: mol_type = other DNA; mol_type = other DNA
aggtcaaggccttgaggagcagaaa

SEQ ID NO: 5935 - DNA, 25 bp, synthetic construct
  source 1..25: mol_type = other DNA; mol_type = other DNA
gaggtcaaggccttgaggagcaggg

SEQ ID NO: 5936 - DNA, 25 bp, synthetic construct
  source 1..25: mol_type = other DNA; mol_type = other DNA
gaggtcaaggccttgaggagcagga

SEQ ID NO: 5937 - DNA, 25 bp, synthetic construct
  source 1..25: mol_type = other DNA; mol_type = other DNA
gaggtcaaggccttgaggagcagaa

SEQ ID NO: 5938 - DNA, 25 bp, synthetic construct
  source 1..25: mol_type = other DNA; mol_type = other DNA
ggaggtcaaggccttgaggagcagg

SEQ ID NO: 5939 - DNA, 25 bp, synthetic construct
  source 1..25: mol_type = other DNA; mol_type = other DNA
ggaggtcaaggccttgaggagcaga

SEQ ID NO: 5940 - DNA, 25 bp, synthetic construct
  source 1..25: mol_type = other DNA; mol_type = other DNA
ggaggtcaaggccttgaggagcaaa

SEQ ID NO: 5941 - DNA, 25 bp, synthetic construct
  source 1..25: mol_type = other DNA; mol_type = other DNA
gggaggtcaaggccttgaggagcaa

SEQ ID NO: 5942 - DNA, 25 bp, synthetic construct
  source 1..25: mol_type = other DNA; mol_type = other DNA
gggaggtcaaggccttgaggaacaa

SEQ ID NO: 5943 - DNA, 25 bp, synthetic construct
  source 1..25: mol_type = other DNA; mol_type = other DNA
tgggaggtcaaggccttgaggagca

SEQ ID NO: 5944 - DNA, 25 bp, synthetic construct
  source 1..25: mol_type = other DNA; mol_type = other DNA
gtggaggtcaaggccttgaggagca

SEQ ID NO: 5945 - DNA, 25 bp, synthetic construct
  source 1..25: mol_type = other DNA; mol_type = other DNA
ggtgaggtcaaggccttgaggagca

SEQ ID NO: 5946 - DNA, 25 bp, synthetic construct
  source 1..25: mol_type = other DNA; mol_type = other DNA
gggtaggtcaaggccttgaggagca

SEQ ID NO: 5947 - DNA, 25 bp, synthetic construct
  source 1..25: mol_type = other DNA; mol_type = other DNA
aaggaggtcaaggccttgaggagca

SEQ ID NO: 5948 - DNA, 25 bp, synthetic construct
  source 1..25: mol_type = other DNA; mol_type = other DNA
agagaggtcaaggccttgaggagca

SEQ ID NO: 5949 - DNA, 25 bp, synthetic construct
  source 1..25: mol_type = other DNA; mol_type = other DNA
gagaaggtcaaggccttgaggagca

SEQ ID NO: 5950 - DNA, 25 bp, synthetic construct
  source 1..25: mol_type = other DNA; mol_type = other DNA
gaggaagtcaaggccttgaggagca

SEQ ID NO: 5951 - DNA, 25 bp, synthetic construct
  source 1..25: mol_type = other DNA; mol_type = other DNA
atgggaggtcaaggccttgaggagc

SEQ ID NO: 5952 - DNA, 25 bp, synthetic construct
  source 1..25: mol_type = other DNA; mol_type = other DNA
agtggaggtcaaggccttgaggagc

SEQ ID NO: 5953 - DNA, 25 bp, synthetic construct
  source 1..25: mol_type = other DNA; mol_type = other DNA
aggtgaggtcaaggccttgaggagc

SEQ ID NO: 5954 - DNA, 25 bp, synthetic construct
  source 1..25: mol_type = other DNA; mol_type = other DNA
agggtaggtcaaggccttgaggagc

SEQ ID NO: 5955 - DNA, 25 bp, synthetic construct
  source 1..25: mol_type = other DNA; mol_type = other DNA
aagagaggtcaaggccttgaggagc

SEQ ID NO: 5956 - DNA, 25 bp, synthetic construct
  source 1..25: mol_type = other DNA; mol_type = other DNA
aaggaaggtcaaggccttgaggagc

SEQ ID NO: 5957 - DNA, 25 bp, synthetic construct
  source 1..25: mol_type = other DNA; mol_type = other DNA
agagaaggtcaaggccttgaggagc

SEQ ID NO: 5958 - DNA, 25 bp, synthetic construct
  source 1..25: mol_type = other DNA; mol_type = other DNA
agaggaagtcaaggccttgaggagc

SEQ ID NO: 5959 - DNA, 25 bp, synthetic construct
  source 1..25: mol_type = other DNA; mol_type = other DNA
aatgggaggtcaaggccttgaggag

SEQ ID NO: 5960 - DNA, 25 bp, synthetic construct
  source 1..25: mol_type = other DNA; mol_type = other DNA
aagtggaggtcaaggccttgaggag

SEQ ID NO: 5961 - DNA, 25 bp, synthetic construct
  source 1..25: mol_type = other DNA; mol_type = other DNA
aaggtgaggtcaaggccttgaggag

SEQ ID NO: 5962 - DNA, 25 bp, synthetic construct
  source 1..25: mol_type = other DNA; mol_type = other DNA
aagggtaggtcaaggccttgaggag

SEQ ID NO: 5963 - DNA, 25 bp, synthetic construct
  source 1..25: mol_type = other DNA; mol_type = other DNA
aaagagaggtcaaggccttgaggag

SEQ ID NO: 5964 - DNA, 25 bp, synthetic construct
  source 1..25: mol_type = other DNA; mol_type = other DNA
aaaggaaggtcaaggccttgaggag

SEQ ID NO: 5965 - DNA, 25 bp, synthetic construct
  source 1..25: mol_type = other DNA; mol_type = other DNA
aagaagaggtcaaggccttgaggag

SEQ ID NO: 5966 - DNA, 25 bp, synthetic construct
  source 1..25: mol_type = other DNA; mol_type = other DNA
aagagaaggtcaaggccttgaggag

SEQ ID NO: 5967 - DNA, 25 bp, synthetic construct
  source 1..25: mol_type = other DNA; mol_type = other DNA
aaatgggaggtcaaggccttgagga

SEQ ID NO: 5968 - DNA, 25 bp, synthetic construct
  source 1..25: mol_type = other DNA; mol_type = other DNA
aaagtggaggtcaaggccttgagga

SEQ ID NO: 5969 - DNA, 25 bp, synthetic construct
  source 1..25: mol_type = other DNA; mol_type = other DNA
aaaggtgaggtcaaggccttgagga

SEQ ID NO: 5970 - DNA, 25 bp, synthetic construct
  source 1..25: mol_type = other DNA; mol_type = other DNA
aaagggtaggtcaaggccttgagga

SEQ ID NO: 5971 - DNA, 25 bp, synthetic construct
  source 1..25: mol_type = other DNA; mol_type = other DNA
aaaagagaggtcaaggccttgagga

SEQ ID NO: 5972 - DNA, 25 bp, synthetic construct
  source 1..25: mol_type = other DNA; mol_type = other DNA
aaaaggaaggtcaaggccttgagga

SEQ ID NO: 5973 - DNA, 25 bp, synthetic construct
  source 1..25: mol_type = other DNA; mol_type = other DNA
aaagagaaggtcaaggccttgagga

SEQ ID NO: 5974 - DNA, 25 bp, synthetic construct
  source 1..25: mol_type = other DNA; mol_type = other DNA
aaagaggaagtcaaggccttgagga

SEQ ID NO: 5975 - DNA, 25 bp, synthetic construct
  source 1..25: mol_type = other DNA; mol_type = other DNA
gaaatgggaggtcaaggccttgagg

SEQ ID NO: 5976 - DNA, 25 bp, synthetic construct
  source 1..25: mol_type = other DNA; mol_type = other DNA
gaaagtggaggtcaaggccttgagg

SEQ ID NO: 5977 - DNA, 25 bp, synthetic construct
  source 1..25: mol_type = other DNA; mol_type = other DNA
gaaaggtgaggtcaaggccttgagg

SEQ ID NO: 5978 - DNA, 25 bp, synthetic construct
  source 1..25: mol_type = other DNA; mol_type = other DNA
gaaagggtaggtcaaggccttgagg

SEQ ID NO: 5979 - DNA, 25 bp, synthetic construct
  source 1..25: mol_type = other DNA; mol_type = other DNA
aaaagaggaggtcaaggccttgagg

SEQ ID NO: 5980 - DNA, 25 bp, synthetic construct
  source 1..25: mol_type = other DNA; mol_type = other DNA
aaaaggagaggtcaaggccttgagg

SEQ ID NO: 5981 - DNA, 25 bp, synthetic construct
  source 1..25: mol_type = other DNA; mol_type = other DNA
gaaaagagaggtcaaggccttgagg

SEQ ID NO: 5982 - DNA, 25 bp, synthetic construct
  source 1..25: mol_type = other DNA; mol_type = other DNA
gaaagaagaggtcaaggccttgagg

SEQ ID NO: 5983 - DNA, 25 bp, synthetic construct
  source 1..25: mol_type = other DNA; mol_type = other DNA
ggaaatgggaggtcaaggccttgag

SEQ ID NO: 5984 - DNA, 25 bp, synthetic construct
  source 1..25: mol_type = other DNA; mol_type = other DNA
ggaaagtggaggtcaaggccttgag

SEQ ID NO: 5985 - DNA, 25 bp, synthetic construct
  source 1..25: mol_type = other DNA; mol_type = other DNA
ggaaaggtgaggtcaaggccttgag

SEQ ID NO: 5986 - DNA, 25 bp, synthetic construct
  source 1..25: mol_type = other DNA; mol_type = other DNA
ggaaagggtaggtcaaggccttgag

SEQ ID NO: 5987 - DNA, 25 bp, synthetic construct
  source 1..25: mol_type = other DNA; mol_type = other DNA
agaaagaggaggtcaaggccttgag

SEQ ID NO: 5988 - DNA, 25 bp, synthetic construct
  source 1..25: mol_type = other DNA; mol_type = other DNA
agaaaggagaggtcaaggccttgag

SEQ ID NO: 5989 - DNA, 25 bp, synthetic construct
  source 1..25: mol_type = other DNA; mol_type = other DNA
gaaaagaggaggtcaaggccttgag

SEQ ID NO: 5990 - DNA, 25 bp, synthetic construct
  source 1..25: mol_type = other DNA; mol_type = other DNA
ggaaaagagaggtcaaggccttgag

SEQ ID NO: 5991 - DNA, 25 bp, synthetic construct
  source 1..25: mol_type = other DNA; mol_type = other DNA
gggaaatgggaggtcaaggccttga

SEQ ID NO: 5992 - DNA, 25 bp, synthetic construct
  source 1..25: mol_type = other DNA; mol_type = other DNA
gggaaagtggaggtcaaggccttga

SEQ ID NO: 5993 - DNA, 25 bp, synthetic construct
  source 1..25: mol_type = other DNA; mol_type = other DNA
gggaaaggtgaggtcaaggccttga

SEQ ID NO: 5994 - DNA, 25 bp, synthetic construct
  source 1..25: mol_type = other DNA; mol_type = other DNA
gggaaagggtaggtcaaggccttga

SEQ ID NO: 5995 - DNA, 25 bp, synthetic construct
  source 1..25: mol_type = other DNA; mol_type = other DNA
aggaaagaggaggtcaaggccttga

SEQ ID NO: 5996 - DNA, 25 bp, synthetic construct
  source 1..25: mol_type = other DNA; mol_type = other DNA
aggaaaggagaggtcaaggccttga

SEQ ID NO: 5997 - DNA, 25 bp, synthetic construct
  source 1..25: mol_type = other DNA; mol_type = other DNA
gagaaagaggaggtcaaggccttga

SEQ ID NO: 5998 - DNA, 25 bp, synthetic construct
  source 1..25: mol_type = other DNA; mol_type = other DNA
ggaaaagaggaggtcaaggccttga

SEQ ID NO: 5999 - DNA, 25 bp, synthetic construct
  source 1..25: mol_type = other DNA; mol_type = other DNA
agggaaatgggaggtcaaggccttg

SEQ ID NO: 6000 - DNA, 25 bp, synthetic construct
  source 1..25: mol_type = other DNA; mol_type = other DNA
agggaaagtggaggtcaaggccttg

SEQ ID NO: 6001 - DNA, 25 bp, synthetic construct
  source 1..25: mol_type = other DNA; mol_type = other DNA
agggaaaggtgaggtcaaggccttg

SEQ ID NO: 6002 - DNA, 25 bp, synthetic construct
  source 1..25: mol_type = other DNA; mol_type = other DNA
agggaaagggtaggtcaaggccttg

SEQ ID NO: 6003 - DNA, 25 bp, synthetic construct
  source 1..25: mol_type = other DNA; mol_type = other DNA
aaggaaagaggaggtcaaggccttg

SEQ ID NO: 6004 - DNA, 25 bp, synthetic construct
  source 1..25: mol_type = other DNA; mol_type = other DNA
agagaaagaggaggtcaaggccttg

SEQ ID NO: 6005 - DNA, 25 bp, synthetic construct
  source 1..25: mol_type = other DNA; mol_type = other DNA
aggaaaagaggaggtcaaggccttg

SEQ ID NO: 6006 - DNA, 25 bp, synthetic construct
  source 1..25: mol_type = other DNA; mol_type = other DNA
aggaaaaggagaggtcaaggccttg

SEQ ID NO: 6007 - DNA, 25 bp, synthetic construct
  source 1..25: mol_type = other DNA; mol_type = other DNA
gagggaaatgggaggtcaaggcctt

SEQ ID NO: 6008 - DNA, 25 bp, synthetic construct
  source 1..25: mol_type = other DNA; mol_type = other DNA
gagggaaagtggaggtcaaggcctt

SEQ ID NO: 6009 - DNA, 25 bp, synthetic construct
  source 1..25: mol_type = other DNA; mol_type = other DNA
gagggaaaggtgaggtcaaggcctt

SEQ ID NO: 6010 - DNA, 25 bp, synthetic construct
  source 1..25: mol_type = other DNA; mol_type = other DNA
gagggaaagggtaggtcaaggcctt

SEQ ID NO: 6011 - DNA, 25 bp, synthetic construct
  source 1..25: mol_type = other DNA; mol_type = other DNA
gaaggaaagaggaggtcaaggcctt

SEQ ID NO: 6012 - DNA, 25 bp, synthetic construct
  source 1..25: mol_type = other DNA; mol_type = other DNA
gaaggaaaggagaggtcaaggcctt

SEQ ID NO: 6013 - DNA, 25 bp, synthetic construct
  source 1..25: mol_type = other DNA; mol_type = other DNA
gagagaaagaggaggtcaaggcctt

SEQ ID NO: 6014 - DNA, 25 bp, synthetic construct
  source 1..25: mol_type = other DNA; mol_type = other DNA
gagagaaaggagaggtcaaggcctt

SEQ ID NO: 6015 - DNA, 25 bp, synthetic construct
  source 1..25: mol_type = other DNA; mol_type = other DNA
tgagggaaatgggaggtcaaggcct

SEQ ID NO: 6016 - DNA, 25 bp, synthetic construct
  source 1..25: mol_type = other DNA; mol_type = other DNA
tgagggaaagtggaggtcaaggcct

SEQ ID NO: 6017 - DNA, 25 bp, synthetic construct
  source 1..25: mol_type = other DNA; mol_type = other DNA
tgagggaaaggtgaggtcaaggcct

SEQ ID NO: 6018 - DNA, 25 bp, synthetic construct
  source 1..25: mol_type = other DNA; mol_type = other DNA
tgagggaaagggtaggtcaaggcct

SEQ ID NO: 6019 - DNA, 25 bp, synthetic construct
  source 1..25: mol_type = other DNA; mol_type = other DNA
tgaaggaaagaggaggtcaaggcct

SEQ ID NO: 6020 - DNA, 25 bp, synthetic construct
  source 1..25: mol_type = other DNA; mol_type = other DNA
tgaaggaaaggagaggtcaaggcct

SEQ ID NO: 6021 - DNA, 25 bp, synthetic construct
  source 1..25: mol_type = other DNA; mol_type = other DNA
tgagagaaagaggaggtcaaggcct

SEQ ID NO: 6022 - DNA, 25 bp, synthetic construct
  source 1..25: mol_type = other DNA; mol_type = other DNA
tgagagaaaggagaggtcaaggcct

SEQ ID NO: 6023 - DNA, 25 bp, synthetic construct
  source 1..25: mol_type = other DNA; mol_type = other DNA
ctgagggaaatgggaggtcaaggcc

SEQ ID NO: 6024 - DNA, 25 bp, synthetic construct
  source 1..25: mol_type = other DNA; mol_type = other DNA
ctgagggaaagtggaggtcaaggcc

SEQ ID NO: 6025 - DNA, 25 bp, synthetic construct
  source 1..25: mol_type = other DNA; mol_type = other DNA
ctgagggaaaggtgaggtcaaggcc

SEQ ID NO: 6026 - DNA, 25 bp, synthetic construct
  source 1..25: mol_type = other DNA; mol_type = other DNA
ctgagggaaagggtaggtcaaggcc

SEQ ID NO: 6027 - DNA, 25 bp, synthetic construct
  source 1..25: mol_type = other DNA; mol_type = other DNA
ctgaaggaaagaggaggtcaaggcc

SEQ ID NO: 6028 - DNA, 25 bp, synthetic construct
  source 1..25: mol_type = other DNA; mol_type = other DNA
ctgaaggaaaggagaggtcaaggcc

SEQ ID NO: 6029 - DNA, 25 bp, synthetic construct
  source 1..25: mol_type = other DNA; mol_type = other DNA
ctgagagaaagaggaggtcaaggcc

SEQ ID NO: 6030 - DNA, 25 bp, synthetic construct
  source 1..25: mol_type = other DNA; mol_type = other DNA
ctgagagaaaggagaggtcaaggcc

SEQ ID NO: 6031 - DNA, 25 bp, synthetic construct
  source 1..25: mol_type = other DNA; mol_type = other DNA
cctgagggaaatgggaggtcaaggc

SEQ ID NO: 6032 - DNA, 25 bp, synthetic construct
  source 1..25: mol_type = other DNA; mol_type = other DNA
cctgagggaaagtggaggtcaaggc

SEQ ID NO: 6033 - DNA, 25 bp, synthetic construct
  source 1..25: mol_type = other DNA; mol_type = other DNA
cctgagggaaaggtgaggtcaaggc

SEQ ID NO: 6034 - DNA, 25 bp, synthetic construct
  source 1..25: mol_type = other DNA; mol_type = other DNA
cctgagggaaagggtaggtcaaggc

SEQ ID NO: 6035 - DNA, 25 bp, synthetic construct
  source 1..25: mol_type = other DNA; mol_type = other DNA
cctgaaggaaagaggaggtcaaggc

SEQ ID NO: 6036 - DNA, 25 bp, synthetic construct
  source 1..25: mol_type = other DNA; mol_type = other DNA
cctgaaggaaaggagaggtcaaggc

SEQ ID NO: 6037 - DNA, 25 bp, synthetic construct
  source 1..25: mol_type = other DNA; mol_type = other DNA
cctgagagaaagaggaggtcaaggc

SEQ ID NO: 6038 - DNA, 25 bp, synthetic construct
  source 1..25: mol_type = other DNA; mol_type = other DNA
cctgagagaaaggagaggtcaaggc

SEQ ID NO: 6039 - DNA, 25 bp, synthetic construct
  source 1..25: mol_type = other DNA; mol_type = other DNA
acctgagggaaatgggaggtcaagg

SEQ ID NO: 6040 - DNA, 25 bp, synthetic construct
  source 1..25: mol_type = other DNA; mol_type = other DNA
acctgagggaaagtggaggtcaagg

SEQ ID NO: 6041 - DNA, 25 bp, synthetic construct
  source 1..25: mol_type = other DNA; mol_type = other DNA
acctgagggaaaggtgaggtcaagg

SEQ ID NO: 6042 - DNA, 25 bp, synthetic construct
  source 1..25: mol_type = other DNA; mol_type = other DNA
acctgagggaaagggtaggtcaagg

SEQ ID NO: 6043 - DNA, 25 bp, synthetic construct
  source 1..25: mol_type = other DNA; mol_type = other DNA
acctgaaggaaagaggaggtcaagg

SEQ ID NO: 6044 - DNA, 25 bp, synthetic construct
  source 1..25: mol_type = other DNA; mol_type = other DNA
acctgaaggaaaggagaggtcaagg

SEQ ID NO: 6045 - DNA, 25 bp, synthetic construct
  source 1..25: mol_type = other DNA; mol_type = other DNA
acctgagagaaagaggaggtcaagg

SEQ ID NO: 6046 - DNA, 25 bp, synthetic construct
  source 1..25: mol_type = other DNA; mol_type = other DNA
acctgagagaaaggagaggtcaagg

SEQ ID NO: 6047 - DNA, 25 bp, synthetic construct
  source 1..25: mol_type = other DNA; mol_type = other DNA
cacctgagggaaatgggaggtcaag

SEQ ID NO: 6048 - DNA, 25 bp, synthetic construct
  source 1..25: mol_type = other DNA; mol_type = other DNA
cacctgagggaaagtggaggtcaag

SEQ ID NO: 6049 - DNA, 25 bp, synthetic construct
  source 1..25: mol_type = other DNA; mol_type = other DNA
cacctgagggaaaggtgaggtcaag

SEQ ID NO: 6050 - DNA, 25 bp, synthetic construct
  source 1..25: mol_type = other DNA; mol_type = other DNA
cacctgagggaaagggtaggtcaag

SEQ ID NO: 6051 - DNA, 25 bp, synthetic construct
  source 1..25: mol_type = other DNA; mol_type = other DNA
cacctgaaggaaagaggaggtcaag

SEQ ID NO: 6052 - DNA, 25 bp, synthetic construct
  source 1..25: mol_type = other DNA; mol_type = other DNA
cacctgaaggaaaggagaggtcaag

SEQ ID NO: 6053 - DNA, 25 bp, synthetic construct
  source 1..25: mol_type = other DNA; mol_type = other DNA
cacctgagagaaagaggaggtcaag

SEQ ID NO: 6054 - DNA, 25 bp, synthetic construct
  source 1..25: mol_type = other DNA; mol_type = other DNA
cacctgagagaaaggagaggtcaag

SEQ ID NO: 6055 - DNA, 25 bp, synthetic construct
  source 1..25: mol_type = other DNA; mol_type = other DNA
ccacctgagggaaatgggaggtcaa

SEQ ID NO: 6056 - DNA, 25 bp, synthetic construct
  source 1..25: mol_type = other DNA; mol_type = other DNA
ccacctgagggaaagtggaggtcaa

SEQ ID NO: 6057 - DNA, 25 bp, synthetic construct
  source 1..25: mol_type = other DNA; mol_type = other DNA
ccacctgagggaaaggtgaggtcaa

SEQ ID NO: 6058 - DNA, 25 bp, synthetic construct
  source 1..25: mol_type = other DNA; mol_type = other DNA
ccacctgagggaaagggtaggtcaa

SEQ ID NO: 6059 - DNA, 25 bp, synthetic construct
  source 1..25: mol_type = other DNA; mol_type = other DNA
ccacctgaaggaaagaggaggtcaa

SEQ ID NO: 6060 - DNA, 25 bp, synthetic construct
  source 1..25: mol_type = other DNA; mol_type = other DNA
ccacctgaaggaaaggagaggtcaa

SEQ ID NO: 6061 - DNA, 25 bp, synthetic construct
  source 1..25: mol_type = other DNA; mol_type = other DNA
ccacctgagagaaagaggaggtcaa

SEQ ID NO: 6062 - DNA, 25 bp, synthetic construct
  source 1..25: mol_type = other DNA; mol_type = other DNA
ccacctgagagaaaggagaggtcaa

SEQ ID NO: 6063 - DNA, 25 bp, synthetic construct
  source 1..25: mol_type = other DNA; mol_type = other DNA
gccacctgagggaaatgggaggtca

SEQ ID NO: 6064 - DNA, 25 bp, synthetic construct
  source 1..25: mol_type = other DNA; mol_type = other DNA
gccacctgagggaaagtggaggtca

SEQ ID NO: 6065 - DNA, 25 bp, synthetic construct
  source 1..25: mol_type = other DNA; mol_type = other DNA
gccacctgagggaaaggtgaggtca

SEQ ID NO: 6066 - DNA, 25 bp, synthetic construct
  source 1..25: mol_type = other DNA; mol_type = other DNA
gccacctgagggaaagggtaggtca

SEQ ID NO: 6067 - DNA, 25 bp, synthetic construct
  source 1..25: mol_type = other DNA; mol_type = other DNA
gccacctgaaggaaagaggaggtca

SEQ ID NO: 6068 - DNA, 25 bp, synthetic construct
  source 1..25: mol_type = other DNA; mol_type = other DNA
gccacctgaaggaaaggagaggtca

SEQ ID NO: 6069 - DNA, 25 bp, synthetic construct
  source 1..25: mol_type = other DNA; mol_type = other DNA
gccacctgagagaaagaggaggtca

SEQ ID NO: 6070 - DNA, 25 bp, synthetic construct
  source 1..25: mol_type = other DNA; mol_type = other DNA
gccacctgagagaaaggagaggtca

SEQ ID NO: 6071 - DNA, 25 bp, synthetic construct
  source 1..25: mol_type = other DNA; mol_type = other DNA
ggccacctgagggaaatgggaggtc

SEQ ID NO: 6072 - DNA, 25 bp, synthetic construct
  source 1..25: mol_type = other DNA; mol_type = other DNA
ggccacctgagggaaagtggaggtc

SEQ ID NO: 6073 - DNA, 25 bp, synthetic construct
  source 1..25: mol_type = other DNA; mol_type = other DNA
ggccacctgagggaaaggtgaggtc

SEQ ID NO: 6074 - DNA, 25 bp, synthetic construct
  source 1..25: mol_type = other DNA; mol_type = other DNA
ggccacctgagggaaagggtaggtc

SEQ ID NO: 6075 - DNA, 25 bp, synthetic construct
  source 1..25: mol_type = other DNA; mol_type = other DNA
ggccacctgaaggaaagaggaggtc

SEQ ID NO: 6076 - DNA, 25 bp, synthetic construct
  source 1..25: mol_type = other DNA; mol_type = other DNA
ggccacctgaaggaaaggagaggtc

SEQ ID NO: 6077 - DNA, 25 bp, synthetic construct
  source 1..25: mol_type = other DNA; mol_type = other DNA
ggccacctgagagaaagaggaggtc

SEQ ID NO: 6078 - DNA, 25 bp, synthetic construct
  source 1..25: mol_type = other DNA; mol_type = other DNA
ggccacctgagagaaaggagaggtc

SEQ ID NO: 6079 - DNA, 25 bp, synthetic construct
  source 1..25: mol_type = other DNA; mol_type = other DNA
tggccacctgagggaaatgggaggt

SEQ ID NO: 6080 - DNA, 25 bp, synthetic construct
  source 1..25: mol_type = other DNA; mol_type = other DNA
tggccacctgagggaaagtggaggt

SEQ ID NO: 6081 - DNA, 25 bp, synthetic construct
  source 1..25: mol_type = other DNA; mol_type = other DNA
tggccacctgagggaaaggtgaggt

SEQ ID NO: 6082 - DNA, 25 bp, synthetic construct
  source 1..25: mol_type = other DNA; mol_type = other DNA
tggccacctgagggaaagggtaggt

SEQ ID NO: 6083 - DNA, 25 bp, synthetic construct
  source 1..25: mol_type = other DNA; mol_type = other DNA
tggccacctgaaggaaagaggaggt

SEQ ID NO: 6084 - DNA, 25 bp, synthetic construct
  source 1..25: mol_type = other DNA; mol_type = other DNA
tggccacctgaaggaaaggagaggt

SEQ ID NO: 6085 - DNA, 25 bp, synthetic construct
  source 1..25: mol_type = other DNA; mol_type = other DNA
tggccacctgagagaaagaggaggt

SEQ ID NO: 6086 - DNA, 25 bp, synthetic construct
  source 1..25: mol_type = other DNA; mol_type = other DNA
tggccacctgagagaaaggagaggt

SEQ ID NO: 6087 - DNA, 25 bp, synthetic construct
  source 1..25: mol_type = other DNA; mol_type = other DNA
atggccacctgagggaaatgggagg

SEQ ID NO: 6088 - DNA, 25 bp, synthetic construct
  source 1..25: mol_type = other DNA; mol_type = other DNA
atggccacctgagggaaagtggagg

SEQ ID NO: 6089 - DNA, 25 bp, synthetic construct
  source 1..25: mol_type = other DNA; mol_type = other DNA
atggccacctgagggaaaggtgagg

SEQ ID NO: 6090 - DNA, 25 bp, synthetic construct
  source 1..25: mol_type = other DNA; mol_type = other DNA
atggccacctgagggaaagggtagg

SEQ ID NO: 6091 - DNA, 25 bp, synthetic construct
  source 1..25: mol_type = other DNA; mol_type = other DNA
atggccacctgaaggaaagaggagg

SEQ ID NO: 6092 - DNA, 25 bp, synthetic construct
  source 1..25: mol_type = other DNA; mol_type = other DNA
atggccacctgaaggaaaggagagg

SEQ ID NO: 6093 - DNA, 25 bp, synthetic construct
  source 1..25: mol_type = other DNA; mol_type = other DNA
atggccacctgagagaaagaggagg

SEQ ID NO: 6094 - DNA, 25 bp, synthetic construct
  source 1..25: mol_type = other DNA; mol_type = other DNA
atggccacctgagagaaaggagagg

SEQ ID NO: 6095 - DNA, 25 bp, synthetic construct
  source 1..25: mol_type = other DNA; mol_type = other DNA
gatggccacctgagggaaagggaaa

SEQ ID NO: 6096 - DNA, 25 bp, synthetic construct
  source 1..25: mol_type = other DNA; mol_type = other DNA
gatggccacctgagggaaatgggag

SEQ ID NO: 6097 - DNA, 25 bp, synthetic construct
  source 1..25: mol_type = other DNA; mol_type = other DNA
gatggccacctgagggaaagtggag

SEQ ID NO: 6098 - DNA, 25 bp, synthetic construct
  source 1..25: mol_type = other DNA; mol_type = other DNA
gatggccacctgagggaaaggtgag

SEQ ID NO: 6099 - DNA, 25 bp, synthetic construct
  source 1..25: mol_type = other DNA; mol_type = other DNA
gatggccacctgagggaaagggtag

SEQ ID NO: 6100 - DNA, 25 bp, synthetic construct
  source 1..25: mol_type = other DNA; mol_type = other DNA
tgatggccacctgagggaaagggaa

SEQ ID NO: 6101 - DNA, 25 bp, synthetic construct
  source 1..25: mol_type = other DNA; mol_type = other DNA
tgatggccacctgagggaaaggaaa

SEQ ID NO: 6102 - DNA, 25 bp, synthetic construct
  source 1..25: mol_type = other DNA; mol_type = other DNA
atgatggccacctgagggaaaggga

SEQ ID NO: 6103 - DNA, 25 bp, synthetic construct
  source 1..25: mol_type = other DNA; mol_type = other DNA
atgatggccacctgagggaaaggaa

SEQ ID NO: 6104 - DNA, 25 bp, synthetic construct
  source 1..25: mol_type = other DNA; mol_type = other DNA
gatgatggccacctgagggaaaggg

SEQ ID NO: 6105 - DNA, 25 bp, synthetic construct
  source 1..25: mol_type = other DNA; mol_type = other DNA
gatgatggccacctgagggaaagga

SEQ ID NO: 6106 - DNA, 25 bp, synthetic construct
  source 1..25: mol_type = other DNA; mol_type = other DNA
gatgatggccacctgagggaaagaa

SEQ ID NO: 6107 - DNA, 25 bp, synthetic construct
  source 1..25: mol_type = other DNA; mol_type = other DNA
cgatgatggccacctgagggaaaga

SEQ ID NO: 6108 - DNA, 25 bp, synthetic construct
  source 1..25: mol_type = other DNA; mol_type = other DNA
cgatgatggccacctgagggaaaaa

SEQ ID NO: 6109 - DNA, 25 bp, synthetic construct
  source 1..25: mol_type = other DNA; mol_type = other DNA
gcgatgatggccacctgagggaaag

SEQ ID NO: 6110 - DNA, 25 bp, synthetic construct
  source 1..25: mol_type = other DNA; mol_type = other DNA
gcgatgatggccacctgagggaaaa

SEQ ID NO: 6111 - DNA, 25 bp, synthetic construct
  source 1..25: mol_type = other DNA; mol_type = other DNA
gcgatgatggccacctgaggaaaaa

SEQ ID NO: 6112 - DNA, 25 bp, synthetic construct
  source 1..25: mol_type = other DNA; mol_type = other DNA
tgcgatgatggccacctgagggaaa

SEQ ID NO: 6113 - DNA, 25 bp, synthetic construct
  source 1..25: mol_type = other DNA; mol_type = other DNA
tgcgatgatggccacctgaggaaaa

SEQ ID NO: 6114 - DNA, 25 bp, synthetic construct
  source 1..25: mol_type = other DNA; mol_type = other DNA
tgcgatgatggccacctgagaaaaa

SEQ ID NO: 6115 - DNA, 25 bp, synthetic construct
  source 1..25: mol_type = other DNA; mol_type = other DNA
ctgcgatgatggccacctgaggaaa

SEQ ID NO: 6116 - DNA, 25 bp, synthetic construct
  source 1..25: mol_type = other DNA; mol_type = other DNA
ctgcgatgatggccacctgagaaaa

SEQ ID NO: 6117 - DNA, 25 bp, synthetic construct
  source 1..25: mol_type = other DNA; mol_type = other DNA
cctgcgatgatggccacctgaggga

SEQ ID NO: 6118 - DNA, 25 bp, synthetic construct
  source 1..25: mol_type = other DNA; mol_type = other DNA
cctgcgatgatggccacctgaggaa

SEQ ID NO: 6119 - DNA, 25 bp, synthetic construct
  source 1..25: mol_type = other DNA; mol_type = other DNA
cctgcgatgatggccacctgagaaa

SEQ ID NO: 6120 - DNA, 25 bp, synthetic construct
  source 1..25: mol_type = other DNA; mol_type = other DNA
ccctgcgatgatggccacctgaggg

SEQ ID NO: 6121 - DNA, 25 bp, synthetic construct
  source 1..25: mol_type = other DNA; mol_type = other DNA
ccctgcgatgatggccacctgagga

SEQ ID NO: 6122 - DNA, 25 bp, synthetic construct
  source 1..25: mol_type = other DNA; mol_type = other DNA
ccctgcgatgatggccacctgagaa

SEQ ID NO: 6123 - DNA, 25 bp, synthetic construct
  source 1..25: mol_type = other DNA; mol_type = other DNA
tccctgcgatgatggccacctgaga

SEQ ID NO: 6124 - DNA, 25 bp, synthetic construct
  source 1..25: mol_type = other DNA; mol_type = other DNA
tccctgcgatgatggccacctgaaa

SEQ ID NO: 6125 - DNA, 25 bp, synthetic construct
  source 1..25: mol_type = other DNA; mol_type = other DNA
ttccctgcgatgatggccacctgag

SEQ ID NO: 6126 - DNA, 25 bp, synthetic construct
  source 1..25: mol_type = other DNA; mol_type = other DNA
ttccctgcgatgatggccacctgaa

SEQ ID NO: 6127 - DNA, 25 bp, synthetic construct
  source 1..25: mol_type = other DNA; mol_type = other DNA
ttccctgcgatgatggccacctaaa

SEQ ID NO: 6128 - DNA, 25 bp, synthetic construct
  source 1..25: mol_type = other DNA; mol_type = other DNA
gttccctgcgatgatggccacctga

SEQ ID NO: 6129 - DNA, 25 bp, synthetic construct
  source 1..25: mol_type = other DNA; mol_type = other DNA
gttccctgcgatgatggccacctaa

SEQ ID NO: 6130 - DNA, 25 bp, synthetic construct
  source 1..25: mol_type = other DNA; mol_type = other DNA
gttccctgcgatgatgaccacctaa

SEQ ID NO: 6131 - DNA, 25 bp, synthetic construct
  source 1..25: mol_type = other DNA; mol_type = other DNA
agttccctgcgatgatggccaccta

SEQ ID NO: 6132 - DNA, 25 bp, synthetic construct
  source 1..25: mol_type = other DNA; mol_type = other DNA
agttccctgcgatgatgaccaccta

SEQ ID NO: 6133 - DNA, 25 bp, synthetic construct
  source 1..25: mol_type = other DNA; mol_type = other DNA
aagttccctgcgatgatggccacct

SEQ ID NO: 6134 - DNA, 25 bp, synthetic construct
  source 1..25: mol_type = other DNA; mol_type = other DNA
aagttccctgcgatgatgaccacct

SEQ ID NO: 6135 - DNA, 25 bp, synthetic construct
  source 1..25: mol_type = other DNA; mol_type = other DNA
aagttccctgcgatgataaccacct

SEQ ID NO: 6136 - DNA, 25 bp, synthetic construct
  source 1..25: mol_type = other DNA; mol_type = other DNA
aaagttccctgcgatgatggccacc

SEQ ID NO: 6137 - DNA, 25 bp, synthetic construct
  source 1..25: mol_type = other DNA; mol_type = other DNA
aaagttccctgcgatgatgaccacc

SEQ ID NO: 6138 - DNA, 25 bp, synthetic construct
  source 1..25: mol_type = other DNA; mol_type = other DNA
aaagttccctgcgatgataaccacc

SEQ ID NO: 6139 - DNA, 25 bp, synthetic construct
  source 1..25: mol_type = other DNA; mol_type = other DNA
caaagttccctgcgatgatgaccac

SEQ ID NO: 6140 - DNA, 25 bp, synthetic construct
  source 1..25: mol_type = other DNA; mol_type = other DNA
caaagttccctgcgatgataaccac

SEQ ID NO: 6141 - DNA, 25 bp, synthetic construct
  source 1..25: mol_type = other DNA; mol_type = other DNA
tcaaagttccctgcgatgatggcca

SEQ ID NO: 6142 - DNA, 25 bp, synthetic construct
  source 1..25: mol_type = other DNA; mol_type = other DNA
tcaaagttccctgcgatgatgacca

SEQ ID NO: 6143 - DNA, 25 bp, synthetic construct
  source 1..25: mol_type = other DNA; mol_type = other DNA
tcaaagttccctgcgatgataacca

SEQ ID NO: 6144 - DNA, 25 bp, synthetic construct
  source 1..25: mol_type = other DNA; mol_type = other DNA
ctcaaagttccctgcgatgatggcc

SEQ ID NO: 6145 - DNA, 25 bp, synthetic construct
  source 1..25: mol_type = other DNA; mol_type = other DNA
ctcaaagttccctgcgatgatgacc

SEQ ID NO: 6146 - DNA, 25 bp, synthetic construct
  source 1..25: mol_type = other DNA; mol_type = other DNA
ctcaaagttccctgcgatgataacc

SEQ ID NO: 6147 - DNA, 25 bp, synthetic construct
  source 1..25: mol_type = other DNA; mol_type = other DNA
gctcaaagttccctgcgatgatgac

SEQ ID NO: 6148 - DNA, 25 bp, synthetic construct
  source 1..25: mol_type = other DNA; mol_type = other DNA
gctcaaagttccctgcgatgataac

SEQ ID NO: 6149 - DNA, 25 bp, synthetic construct
  source 1..25: mol_type = other DNA; mol_type = other DNA
agctcaaagttccctgcgatgatgg

SEQ ID NO: 6150 - DNA, 25 bp, synthetic construct
  source 1..25: mol_type = other DNA; mol_type = other DNA
agctcaaagttccctgcgatgatga

SEQ ID NO: 6151 - DNA, 25 bp, synthetic construct
  source 1..25: mol_type = other DNA; mol_type = other DNA
agctcaaagttccctgcgatgataa

SEQ ID NO: 6152 - DNA, 25 bp, synthetic construct
  source 1..25: mol_type = other DNA; mol_type = other DNA
aagctcaaagttccctgcgatgatg

SEQ ID NO: 6153 - DNA, 25 bp, synthetic construct
  source 1..25: mol_type = other DNA; mol_type = other DNA
aagctcaaagttccctgcgatgata

SEQ ID NO: 6154 - DNA, 25 bp, synthetic construct
  source 1..25: mol_type = other DNA; mol_type = other DNA
aagctcaaagttccctgcgataata

SEQ ID NO: 6155 - DNA, 25 bp, synthetic construct
  source 1..25: mol_type = other DNA; mol_type = other DNA
caagctcaaagttccctgcgataat

SEQ ID NO: 6156 - DNA, 25 bp, synthetic construct
  source 1..25: mol_type = other DNA; mol_type = other DNA
caagctcaaagttccctgcaataat

SEQ ID NO: 6157 - DNA, 25 bp, synthetic construct
  source 1..25: mol_type = other DNA; mol_type = other DNA
gcaagctcaaagttccctgcgatga

SEQ ID NO: 6158 - DNA, 25 bp, synthetic construct
  source 1..25: mol_type = other DNA; mol_type = other DNA
gcaagctcaaagttccctgcgataa

SEQ ID NO: 6159 - DNA, 25 bp, synthetic construct
  source 1..25: mol_type = other DNA; mol_type = other DNA
gcaagctcaaagttccctgcaataa

SEQ ID NO: 6160 - DNA, 25 bp, synthetic construct
  source 1..25: mol_type = other DNA; mol_type = other DNA
tgcaagctcaaagttccctgcgatg

SEQ ID NO: 6161 - DNA, 25 bp, synthetic construct
  source 1..25: mol_type = other DNA; mol_type = other DNA
tgcaagctcaaagttccctgcgata

SEQ ID NO: 6162 - DNA, 25 bp, synthetic construct
  source 1..25: mol_type = other DNA; mol_type = other DNA
tgcaagctcaaagttccctgcaata

SEQ ID NO: 6163 - DNA, 25 bp, synthetic construct
  source 1..25: mol_type = other DNA; mol_type = other DNA
ctgcaagctcaaagttccctgcaat

SEQ ID NO: 6164 - DNA, 25 bp, synthetic construct
  source 1..25: mol_type = other DNA; mol_type = other DNA
ctgcaagctcaaagttccctacaat

SEQ ID NO: 6165 - DNA, 25 bp, synthetic construct
  source 1..25: mol_type = other DNA; mol_type = other DNA
tctgcaagctcaaagttccctgcga

SEQ ID NO: 6166 - DNA, 25 bp, synthetic construct
  source 1..25: mol_type = other DNA; mol_type = other DNA
tctgcaagctcaaagttccctgcaa

SEQ ID NO: 6167 - DNA, 25 bp, synthetic construct
  source 1..25: mol_type = other DNA; mol_type = other DNA
tctgcaagctcaaagttccctacaa

SEQ ID NO: 6168 - DNA, 25 bp, synthetic construct
  source 1..25: mol_type = other DNA; mol_type = other DNA
ctctgcaagctcaaagttccctgcg

SEQ ID NO: 6169 - DNA, 25 bp, synthetic construct
  source 1..25: mol_type = other DNA; mol_type = other DNA
ctctgcaagctcaaagttccctgca

SEQ ID NO: 6170 - DNA, 25 bp, synthetic construct
  source 1..25: mol_type = other DNA; mol_type = other DNA
ctctgcaagctcaaagttccctaca

SEQ ID NO: 6171 - DNA, 25 bp, synthetic construct
  source 1..25: mol_type = other DNA; mol_type = other DNA
cctctgcaagctcaaagttccctac

SEQ ID NO: 6172 - DNA, 25 bp, synthetic construct
  source 1..25: mol_type = other DNA; mol_type = other DNA
cctctgcaagctcaaaattccctac

SEQ ID NO: 6173 - DNA, 25 bp, synthetic construct
  source 1..25: mol_type = other DNA; mol_type = other DNA
acctctgcaagctcaaagttccctg

SEQ ID NO: 6174 - DNA, 25 bp, synthetic construct
  source 1..25: mol_type = other DNA; mol_type = other DNA
acctctgcaagctcaaagttcccta

SEQ ID NO: 6175 - DNA, 25 bp, synthetic construct
  source 1..25: mol_type = other DNA; mol_type = other DNA
acctctgcaagctcaaaattcccta

SEQ ID NO: 6176 - DNA, 25 bp, synthetic construct
  source 1..25: mol_type = other DNA; mol_type = other DNA
aacctctgcaagctcaaagttccct

SEQ ID NO: 6177 - DNA, 25 bp, synthetic construct
  source 1..25: mol_type = other DNA; mol_type = other DNA
aacctctgcaagctcaaaattccct

SEQ ID NO: 6178 - DNA, 25 bp, synthetic construct
  source 1..25: mol_type = other DNA; mol_type = other DNA
aacctctgcaaactcaaaattccct

SEQ ID NO: 6179 - DNA, 25 bp, synthetic construct
  source 1..25: mol_type = other DNA; mol_type = other DNA
taacctctgcaagctcaaaattccc

SEQ ID NO: 6180 - DNA, 25 bp, synthetic construct
  source 1..25: mol_type = other DNA; mol_type = other DNA
taacctctgcaaactcaaaattccc

SEQ ID NO: 6181 - DNA, 25 bp, synthetic construct
  source 1..25: mol_type = other DNA; mol_type = other DNA
ataacctctgcaagctcaaagttcc

SEQ ID NO: 6182 - DNA, 25 bp, synthetic construct
  source 1..25: mol_type = other DNA; mol_type = other DNA
ataacctctgcaagctcaaaattcc

SEQ ID NO: 6183 - DNA, 25 bp, synthetic construct
  source 1..25: mol_type = other DNA; mol_type = other DNA
ataacctctgcaaactcaaaattcc

SEQ ID NO: 6184 - DNA, 25 bp, synthetic construct
  source 1..25: mol_type = other DNA; mol_type = other DNA
gataacctctgcaagctcaaagttc

SEQ ID NO: 6185 - DNA, 25 bp, synthetic construct
  source 1..25: mol_type = other DNA; mol_type = other DNA
gataacctctgcaagctcaaaattc

SEQ ID NO: 6186 - DNA, 25 bp, synthetic construct
  source 1..25: mol_type = other DNA; mol_type = other DNA
gataacctctgcaaactcaaaattc

SEQ ID NO: 6187 - DNA, 25 bp, synthetic construct
  source 1..25: mol_type = other DNA; mol_type = other DNA
tgataacctctgcaagctcaaaatt

SEQ ID NO: 6188 - DNA, 25 bp, synthetic construct
  source 1..25: mol_type = other DNA; mol_type = other DNA
tgataacctctgcaaactcaaaatt

SEQ ID NO: 6189 - DNA, 25 bp, synthetic construct
  source 1..25: mol_type = other DNA; mol_type = other DNA
ttgataacctctgcaagctcaaagt

SEQ ID NO: 6190 - DNA, 25 bp, synthetic construct
  source 1..25: mol_type = other DNA; mol_type = other DNA
ttgataacctctgcaagctcaaaat

SEQ ID NO: 6191 - DNA, 25 bp, synthetic construct
  source 1..25: mol_type = other DNA; mol_type = other DNA
ttgataacctctgcaaactcaaaat

SEQ ID NO: 6192 - DNA, 25 bp, synthetic construct
  source 1..25: mol_type = other DNA; mol_type = other DNA
cttgataacctctgcaagctcaaag

SEQ ID NO: 6193 - DNA, 25 bp, synthetic construct
  source 1..25: mol_type = other DNA; mol_type = other DNA
cttgataacctctgcaagctcaaaa

SEQ ID NO: 6194 - DNA, 25 bp, synthetic construct
  source 1..25: mol_type = other DNA; mol_type = other DNA
cttgataacctctgcaaactcaaaa

SEQ ID NO: 6195 - DNA, 25 bp, synthetic construct
  source 1..25: mol_type = other DNA; mol_type = other DNA
tcttgataacctctgcaaactcaaa

SEQ ID NO: 6196 - DNA, 25 bp, synthetic construct
  source 1..25: mol_type = other DNA; mol_type = other DNA
tcttgataacctctacaaactcaaa

SEQ ID NO: 6197 - DNA, 25 bp, synthetic construct
  source 1..25: mol_type = other DNA; mol_type = other DNA
gtcttgataacctctgcaagctcaa

SEQ ID NO: 6198 - DNA, 25 bp, synthetic construct
  source 1..25: mol_type = other DNA; mol_type = other DNA
gtcttgataacctctgcaaactcaa

SEQ ID NO: 6199 - DNA, 25 bp, synthetic construct
  source 1..25: mol_type = other DNA; mol_type = other DNA
gtcttgataacctctacaaactcaa

SEQ ID NO: 6200 - DNA, 25 bp, synthetic construct
  source 1..25: mol_type = other DNA; mol_type = other DNA
ggtcttgataacctctgcaagctca

SEQ ID NO: 6201 - DNA, 25 bp, synthetic construct
  source 1..25: mol_type = other DNA; mol_type = other DNA
ggtcttgataacctctgcaaactca

SEQ ID NO: 6202 - DNA, 25 bp, synthetic construct
  source 1..25: mol_type = other DNA; mol_type = other DNA
ggtcttgataacctctacaaactca

SEQ ID NO: 6203 - DNA, 25 bp, synthetic construct
  source 1..25: mol_type = other DNA; mol_type = other DNA
gggtcttgataacctctgcaaactc

SEQ ID NO: 6204 - DNA, 25 bp, synthetic construct
  source 1..25: mol_type = other DNA; mol_type = other DNA
gggtcttgataacctctacaaactc

SEQ ID NO: 6205 - DNA, 25 bp, synthetic construct
  source 1..25: mol_type = other DNA; mol_type = other DNA
tgggtcttgataacctctgcaagct

SEQ ID NO: 6206 - DNA, 25 bp, synthetic construct
  source 1..25: mol_type = other DNA; mol_type = other DNA
tgggtcttgataacctctgcaaact

SEQ ID NO: 6207 - DNA, 25 bp, synthetic construct
  source 1..25: mol_type = other DNA; mol_type = other DNA
tgggtcttgataacctctacaaact

SEQ ID NO: 6208 - DNA, 25 bp, synthetic construct
  source 1..25: mol_type = other DNA; mol_type = other DNA
gtgggtcttgataacctctgcaagc

SEQ ID NO: 6209 - DNA, 25 bp, synthetic construct
  source 1..25: mol_type = other DNA; mol_type = other DNA
gtgggtcttgataacctctgcaaac

SEQ ID NO: 6210 - DNA, 25 bp, synthetic construct
  source 1..25: mol_type = other DNA; mol_type = other DNA
gtgggtcttgataacctctacaaac

SEQ ID NO: 6211 - DNA, 25 bp, synthetic construct
  source 1..25: mol_type = other DNA; mol_type = other DNA
tgtgggtcttgataacctctgcaaa

SEQ ID NO: 6212 - DNA, 25 bp, synthetic construct
  source 1..25: mol_type = other DNA; mol_type = other DNA
tgtgggtcttgataacctctacaaa

SEQ ID NO: 6213 - DNA, 25 bp, synthetic construct
  source 1..25: mol_type = other DNA; mol_type = other DNA
ttgtgggtcttgataacctctgcaa

SEQ ID NO: 6214 - DNA, 25 bp, synthetic construct
  source 1..25: mol_type = other DNA; mol_type = other DNA
ttgtgggtcttgataacctctacaa

SEQ ID NO: 6215 - DNA, 25 bp, synthetic construct
  source 1..25: mol_type = other DNA; mol_type = other DNA
ttgtgggtcttaataacctctacaa

SEQ ID NO: 6216 - DNA, 25 bp, synthetic construct
  source 1..25: mol_type = other DNA; mol_type = other DNA
tttgtgggtcttgataacctctgca

SEQ ID NO: 6217 - DNA, 25 bp, synthetic construct
  source 1..25: mol_type = other DNA; mol_type = other DNA
tttgtgggtcttgataacctctaca

SEQ ID NO: 6218 - DNA, 25 bp, synthetic construct
  source 1..25: mol_type = other DNA; mol_type = other DNA
tttgtgggtcttaataacctctaca

SEQ ID NO: 6219 - DNA, 25 bp, synthetic construct
  source 1..25: mol_type = other DNA; mol_type = other DNA
ctttgtgggtcttgataacctctac

SEQ ID NO: 6220 - DNA, 25 bp, synthetic construct
  source 1..25: mol_type = other DNA; mol_type = other DNA
ctttgtgggtcttaataacctctac

SEQ ID NO: 6221 - DNA, 25 bp, synthetic construct
  source 1..25: mol_type = other DNA; mol_type = other DNA
tctttgtgggtcttgataacctctg

SEQ ID NO: 6222 - DNA, 25 bp, synthetic construct
  source 1..25: mol_type = other DNA; mol_type = other DNA
tctttgtgggtcttgataacctcta

SEQ ID NO: 6223 - DNA, 25 bp, synthetic construct
  source 1..25: mol_type = other DNA; mol_type = other DNA
tctttgtgggtcttaataacctcta

SEQ ID NO: 6224 - DNA, 25 bp, synthetic construct
  source 1..25: mol_type = other DNA; mol_type = other DNA
gtctttgtgggtcttgataacctct

SEQ ID NO: 6225 - DNA, 25 bp, synthetic construct
  source 1..25: mol_type = other DNA; mol_type = other DNA
gtctttgtgggtcttaataacctct

SEQ ID NO: 6226 - DNA, 25 bp, synthetic construct
  source 1..25: mol_type = other DNA; mol_type = other DNA
gtctttgtggatcttaataacctct

SEQ ID NO: 6227 - DNA, 25 bp, synthetic construct
  source 1..25: mol_type = other DNA; mol_type = other DNA
agtctttgtgggtcttaataacctc

SEQ ID NO: 6228 - DNA, 25 bp, synthetic construct
  source 1..25: mol_type = other DNA; mol_type = other DNA
agtctttgtggatcttaataacctc

SEQ ID NO: 6229 - DNA, 25 bp, synthetic construct
  source 1..25: mol_type = other DNA; mol_type = other DNA
gagtctttgtgggtcttgataacct

SEQ ID NO: 6230 - DNA, 25 bp, synthetic construct
  source 1..25: mol_type = other DNA; mol_type = other DNA
gagtctttgtgggtcttaataacct

SEQ ID NO: 6231 - DNA, 25 bp, synthetic construct
  source 1..25: mol_type = other DNA; mol_type = other DNA
gagtctttgtggatcttaataacct

SEQ ID NO: 6232 - DNA, 25 bp, synthetic construct
  source 1..25: mol_type = other DNA; mol_type = other DNA
cgagtctttgtgggtcttgataacc

SEQ ID NO: 6233 - DNA, 25 bp, synthetic construct
  source 1..25: mol_type = other DNA; mol_type = other DNA
cgagtctttgtgggtcttaataacc

SEQ ID NO: 6234 - DNA, 25 bp, synthetic construct
  source 1..25: mol_type = other DNA; mol_type = other DNA
cgagtctttgtggatcttaataacc

SEQ ID NO: 6235 - DNA, 25 bp, synthetic construct
  source 1..25: mol_type = other DNA; mol_type = other DNA
ccgagtctttgtgggtcttaataac

SEQ ID NO: 6236 - DNA, 25 bp, synthetic construct
  source 1..25: mol_type = other DNA; mol_type = other DNA
ccgagtctttgtggatcttaataac

SEQ ID NO: 6237 - DNA, 25 bp, synthetic construct
  source 1..25: mol_type = other DNA; mol_type = other DNA
tccgagtctttgtgggtcttgataa

SEQ ID NO: 6238 - DNA, 25 bp, synthetic construct
  source 1..25: mol_type = other DNA; mol_type = other DNA
tccgagtctttgtgggtcttaataa

SEQ ID NO: 6239 - DNA, 25 bp, synthetic construct
  source 1..25: mol_type = other DNA; mol_type = other DNA
tccgagtctttgtggatcttaataa

SEQ ID NO: 6240 - DNA, 25 bp, synthetic construct
  source 1..25: mol_type = other DNA; mol_type = other DNA
atccgagtctttgtgggtcttgata

SEQ ID NO: 6241 - DNA, 25 bp, synthetic construct
  source 1..25: mol_type = other DNA; mol_type = other DNA
atccgagtctttgtgggtcttaata

SEQ ID NO: 6242 - DNA, 25 bp, synthetic construct
  source 1..25: mol_type = other DNA; mol_type = other DNA
atccgagtctttgtggatcttaata

SEQ ID NO: 6243 - DNA, 25 bp, synthetic construct
  source 1..25: mol_type = other DNA; mol_type = other DNA
catccgagtctttgtgggtcttaat

SEQ ID NO: 6244 - DNA, 25 bp, synthetic construct
  source 1..25: mol_type = other DNA; mol_type = other DNA
catccgagtctttgtggatcttaat

SEQ ID NO: 6245 - DNA, 25 bp, synthetic construct
  source 1..25: mol_type = other DNA; mol_type = other DNA
acatccgagtctttgtgggtcttga

SEQ ID NO: 6246 - DNA, 25 bp, synthetic construct
  source 1..25: mol_type = other DNA; mol_type = other DNA
acatccgagtctttgtgggtcttaa

SEQ ID NO: 6247 - DNA, 25 bp, synthetic construct
  source 1..25: mol_type = other DNA; mol_type = other DNA
acatccgagtctttgtggatcttaa

SEQ ID NO: 6248 - DNA, 25 bp, synthetic construct
  source 1..25: mol_type = other DNA; mol_type = other DNA
aacatccgagtctttgtgggtcttg

SEQ ID NO: 6249 - DNA, 25 bp, synthetic construct
  source 1..25: mol_type = other DNA; mol_type = other DNA
aacatccgagtctttgtgggtctta

SEQ ID NO: 6250 - DNA, 25 bp, synthetic construct
  source 1..25: mol_type = other DNA; mol_type = other DNA
aacatccgagtctttgtggatctta

SEQ ID NO: 6251 - DNA, 25 bp, synthetic construct
  source 1..25: mol_type = other DNA; mol_type = other DNA
caacatccgagtctttgtggatctt

SEQ ID NO: 6252 - DNA, 25 bp, synthetic construct
  source 1..25: mol_type = other DNA; mol_type = other DNA
caacatccgagtctttgtgaatctt

SEQ ID NO: 6253 - DNA, 25 bp, synthetic construct
  source 1..25: mol_type = other DNA; mol_type = other DNA
ctccaccgccacccccgccactcac

SEQ ID NO: 6254 - DNA, 25 bp, synthetic construct
  source 1..25: mol_type = other DNA; mol_type = other DNA
ctccaccgccacccccaccactcac

SEQ ID NO: 6255 - DNA, 25 bp, synthetic construct
  source 1..25: mol_type = other DNA; mol_type = other DNA
ctccaccaccacccccaccactcac

SEQ ID NO: 6256 - DNA, 25 bp, synthetic construct
  source 1..25: mol_type = other DNA; mol_type = other DNA
cctccaccgccacccccgccactca

SEQ ID NO: 6257 - DNA, 25 bp, synthetic construct
  source 1..25: mol_type = other DNA; mol_type = other DNA
cctccaccgccacccccaccactca

SEQ ID NO: 6258 - DNA, 25 bp, synthetic construct
  source 1..25: mol_type = other DNA; mol_type = other DNA
cctccaccaccacccccaccactca

SEQ ID NO: 6259 - DNA, 25 bp, synthetic construct
  source 1..25: mol_type = other DNA; mol_type = other DNA
acctccaccgccacccccaccactc

SEQ ID NO: 6260 - DNA, 25 bp, synthetic construct
  source 1..25: mol_type = other DNA; mol_type = other DNA
acctccaccaccacccccaccactc

SEQ ID NO: 6261 - DNA, 25 bp, synthetic construct
  source 1..25: mol_type = other DNA; mol_type = other DNA
cacctccaccgccacccccgccact

SEQ ID NO: 6262 - DNA, 25 bp, synthetic construct
  source 1..25: mol_type = other DNA; mol_type = other DNA
cacctccaccgccacccccaccact

SEQ ID NO: 6263 - DNA, 25 bp, synthetic construct
  source 1..25: mol_type = other DNA; mol_type = other DNA
cacctccaccaccacccccaccact

SEQ ID NO: 6264 - DNA, 25 bp, synthetic construct
  source 1..25: mol_type = other DNA; mol_type = other DNA
ccacctccaccgccacccccgccac

SEQ ID NO: 6265 - DNA, 25 bp, synthetic construct
  source 1..25: mol_type = other DNA; mol_type = other DNA
ccacctccaccgccacccccaccac

SEQ ID NO: 6266 - DNA, 25 bp, synthetic construct
  source 1..25: mol_type = other DNA; mol_type = other DNA
ccacctccaccaccacccccaccac

SEQ ID NO: 6267 - DNA, 25 bp, synthetic construct
  source 1..25: mol_type = other DNA; mol_type = other DNA
tccacctccaccgccacccccacca

SEQ ID NO: 6268 - DNA, 25 bp, synthetic construct
  source 1..25: mol_type = other DNA; mol_type = other DNA
tccacctccaccaccacccccacca

SEQ ID NO: 6269 - DNA, 25 bp, synthetic construct
  source 1..25: mol_type = other DNA; mol_type = other DNA
gtccacctccaccgccacccccgcc

SEQ ID NO: 6270 - DNA, 25 bp, synthetic construct
  source 1..25: mol_type = other DNA; mol_type = other DNA
gtccacctccaccgccacccccacc

SEQ ID NO: 6271 - DNA, 25 bp, synthetic construct
  source 1..25: mol_type = other DNA; mol_type = other DNA
gtccacctccaccaccacccccacc

SEQ ID NO: 6272 - DNA, 25 bp, synthetic construct
  source 1..25: mol_type = other DNA; mol_type = other DNA
cgtccacctccaccgccacccccgc

SEQ ID NO: 6273 - DNA, 25 bp, synthetic construct
  source 1..25: mol_type = other DNA; mol_type = other DNA
cgtccacctccaccgccacccccac

SEQ ID NO: 6274 - DNA, 25 bp, synthetic construct
  source 1..25: mol_type = other DNA; mol_type = other DNA
cgtccacctccaccaccacccccac

SEQ ID NO: 6275 - DNA, 25 bp, synthetic construct
  source 1..25: mol_type = other DNA; mol_type = other DNA
gcgtccacctccaccgccaccccca

SEQ ID NO: 6276 - DNA, 25 bp, synthetic construct
  source 1..25: mol_type = other DNA; mol_type = other DNA
gcgtccacctccaccaccaccccca

SEQ ID NO: 6277 - DNA, 25 bp, synthetic construct
  source 1..25: mol_type = other DNA; mol_type = other DNA
tgcgtccacctccaccgccaccccc

SEQ ID NO: 6278 - DNA, 25 bp, synthetic construct
  source 1..25: mol_type = other DNA; mol_type = other DNA
tgcgtccacctccaccaccaccccc

SEQ ID NO: 6279 - DNA, 25 bp, synthetic construct
  source 1..25: mol_type = other DNA; mol_type = other DNA
tgcatccacctccaccaccaccccc

SEQ ID NO: 6280 - DNA, 25 bp, synthetic construct
  source 1..25: mol_type = other DNA; mol_type = other DNA
ctgcgtccacctccaccgccacccc

SEQ ID NO: 6281 - DNA, 25 bp, synthetic construct
  source 1..25: mol_type = other DNA; mol_type = other DNA
ctgcgtccacctccaccaccacccc

SEQ ID NO: 6282 - DNA, 25 bp, synthetic construct
  source 1..25: mol_type = other DNA; mol_type = other DNA
ctgcatccacctccaccaccacccc

SEQ ID NO: 6283 - DNA, 25 bp, synthetic construct
  source 1..25: mol_type = other DNA; mol_type = other DNA
cctgcgtccacctccaccaccaccc

SEQ ID NO: 6284 - DNA, 25 bp, synthetic construct
  source 1..25: mol_type = other DNA; mol_type = other DNA
cctgcatccacctccaccaccaccc

SEQ ID NO: 6285 - DNA, 25 bp, synthetic construct
  source 1..25: mol_type = other DNA; mol_type = other DNA
acctgcgtccacctccaccgccacc

SEQ ID NO: 6286 - DNA, 25 bp, synthetic construct
  source 1..25: mol_type = other DNA; mol_type = other DNA
acctgcgtccacctccaccaccacc

SEQ ID NO: 6287 - DNA, 25 bp, synthetic construct
  source 1..25: mol_type = other DNA; mol_type = other DNA
acctgcatccacctccaccaccacc

SEQ ID NO: 6288 - DNA, 25 bp, synthetic construct
  source 1..25: mol_type = other DNA; mol_type = other DNA
cacctgcgtccacctccaccgccac

SEQ ID NO: 6289 - DNA, 25 bp, synthetic construct
  source 1..25: mol_type = other DNA; mol_type = other DNA
cacctgcgtccacctccaccaccac

SEQ ID NO: 6290 - DNA, 25 bp, synthetic construct
  source 1..25: mol_type = other DNA; mol_type = other DNA
cacctgcatccacctccaccaccac

SEQ ID NO: 6291 - DNA, 25 bp, synthetic construct
  source 1..25: mol_type = other DNA; mol_type = other DNA
ccacctgcgtccacctccaccacca

SEQ ID NO: 6292 - DNA, 25 bp, synthetic construct
  source 1..25: mol_type = other DNA; mol_type = other DNA
ccacctgcatccacctccaccacca

SEQ ID NO: 6293 - DNA, 25 bp, synthetic construct
  source 1..25: mol_type = other DNA; mol_type = other DNA
tccacctgcgtccacctccaccgcc

SEQ ID NO: 6294 - DNA, 25 bp, synthetic construct
  source 1..25: mol_type = other DNA; mol_type = other DNA
tccacctgcgtccacctccaccacc

SEQ ID NO: 6295 - DNA, 25 bp, synthetic construct
  source 1..25: mol_type = other DNA; mol_type = other DNA
tccacctgcatccacctccaccacc

SEQ ID NO: 6296 - DNA, 25 bp, synthetic construct
  source 1..25: mol_type = other DNA; mol_type = other DNA
gtccacctgcgtccacctccaccgc

SEQ ID NO: 6297 - DNA, 25 bp, synthetic construct
  source 1..25: mol_type = other DNA; mol_type = other DNA
gtccacctgcgtccacctccaccac

SEQ ID NO: 6298 - DNA, 25 bp, synthetic construct
  source 1..25: mol_type = other DNA; mol_type = other DNA
gtccacctgcatccacctccaccac

SEQ ID NO: 6299 - DNA, 25 bp, synthetic construct
  source 1..25: mol_type = other DNA; mol_type = other DNA
cgtccacctgcgtccacctccacca

SEQ ID NO: 6300 - DNA, 25 bp, synthetic construct
  source 1..25: mol_type = other DNA; mol_type = other DNA
cgtccacctgcatccacctccacca

SEQ ID NO: 6301 - DNA, 25 bp, synthetic construct
  source 1..25: mol_type = other DNA; mol_type = other DNA
ccgtccacctgcgtccacctccacc

SEQ ID NO: 6302 - DNA, 25 bp, synthetic construct
  source 1..25: mol_type = other DNA; mol_type = other DNA
ccgtccacctgcatccacctccacc

SEQ ID NO: 6303 - DNA, 25 bp, synthetic construct
  source 1..25: mol_type = other DNA; mol_type = other DNA
ccgtccacctacatccacctccacc

SEQ ID NO: 6304 - DNA, 25 bp, synthetic construct
  source 1..25: mol_type = other DNA; mol_type = other DNA
accgtccacctgcgtccacctccac

SEQ ID NO: 6305 - DNA, 25 bp, synthetic construct
  source 1..25: mol_type = other DNA; mol_type = other DNA
accgtccacctgcatccacctccac

SEQ ID NO: 6306 - DNA, 25 bp, synthetic construct
  source 1..25: mol_type = other DNA; mol_type = other DNA
accgtccacctacatccacctccac

SEQ ID NO: 6307 - DNA, 25 bp, synthetic construct
  source 1..25: mol_type = other DNA; mol_type = other DNA
gaccgtccacctgcatccacctcca

SEQ ID NO: 6308 - DNA, 25 bp, synthetic construct
  source 1..25: mol_type = other DNA; mol_type = other DNA
gaccgtccacctacatccacctcca

SEQ ID NO: 6309 - DNA, 25 bp, synthetic construct
  source 1..25: mol_type = other DNA; mol_type = other DNA
ggaccgtccacctgcgtccacctcc

SEQ ID NO: 6310 - DNA, 25 bp, synthetic construct
  source 1..25: mol_type = other DNA; mol_type = other DNA
ggaccgtccacctgcatccacctcc

SEQ ID NO: 6311 - DNA, 25 bp, synthetic construct
  source 1..25: mol_type = other DNA; mol_type = other DNA
ggaccgtccacctacatccacctcc

SEQ ID NO: 6312 - DNA, 25 bp, synthetic construct
  source 1..25: mol_type = other DNA; mol_type = other DNA
tggaccgtccacctgcgtccacctc

SEQ ID NO: 6313 - DNA, 25 bp, synthetic construct
  source 1..25: mol_type = other DNA; mol_type = other DNA
tggaccgtccacctgcatccacctc

SEQ ID NO: 6314 - DNA, 25 bp, synthetic construct
  source 1..25: mol_type = other DNA; mol_type = other DNA
tggaccgtccacctacatccacctc

SEQ ID NO: 6315 - DNA, 25 bp, synthetic construct
  source 1..25: mol_type = other DNA; mol_type = other DNA
atggaccgtccacctgcatccacct

SEQ ID NO: 6316 - DNA, 25 bp, synthetic construct
  source 1..25: mol_type = other DNA; mol_type = other DNA
atggaccgtccacctacatccacct

SEQ ID NO: 6317 - DNA, 25 bp, synthetic construct
  source 1..25: mol_type = other DNA; mol_type = other DNA
catggaccgtccacctgcgtccacc

SEQ ID NO: 6318 - DNA, 25 bp, synthetic construct
  source 1..25: mol_type = other DNA; mol_type = other DNA
catggaccgtccacctgcatccacc

SEQ ID NO: 6319 - DNA, 25 bp, synthetic construct
  source 1..25: mol_type = other DNA; mol_type = other DNA
catggaccgtccacctacatccacc

SEQ ID NO: 6320 - DNA, 25 bp, synthetic construct
  source 1..25: mol_type = other DNA; mol_type = other DNA
tcatggaccgtccacctgcgtccac

SEQ ID NO: 6321 - DNA, 25 bp, synthetic construct
  source 1..25: mol_type = other DNA; mol_type = other DNA
tcatggaccgtccacctgcatccac

SEQ ID NO: 6322 - DNA, 25 bp, synthetic construct
  source 1..25: mol_type = other DNA; mol_type = other DNA
tcatggaccgtccacctacatccac

SEQ ID NO: 6323 - DNA, 25 bp, synthetic construct
  source 1..25: mol_type = other DNA; mol_type = other DNA
atcatggaccgtccacctgcatcca

SEQ ID NO: 6324 - DNA, 25 bp, synthetic construct
  source 1..25: mol_type = other DNA; mol_type = other DNA
atcatggaccgtccacctacatcca

SEQ ID NO: 6325 - DNA, 25 bp, synthetic construct
  source 1..25: mol_type = other DNA; mol_type = other DNA
catcatggaccgtccacctgcgtcc

SEQ ID NO: 6326 - DNA, 25 bp, synthetic construct
  source 1..25: mol_type = other DNA; mol_type = other DNA
catcatggaccgtccacctgcatcc

SEQ ID NO: 6327 - DNA, 25 bp, synthetic construct
  source 1..25: mol_type = other DNA; mol_type = other DNA
catcatggaccgtccacctacatcc

SEQ ID NO: 6328 - DNA, 25 bp, synthetic construct
  source 1..25: mol_type = other DNA; mol_type = other DNA
ccatcatggaccgtccacctgcgtc

SEQ ID NO: 6329 - DNA, 25 bp, synthetic construct
  source 1..25: mol_type = other DNA; mol_type = other DNA
ccatcatggaccgtccacctgcatc

SEQ ID NO: 6330 - DNA, 25 bp, synthetic construct
  source 1..25: mol_type = other DNA; mol_type = other DNA
ccatcatggaccgtccacctacatc

SEQ ID NO: 6331 - DNA, 25 bp, synthetic construct
  source 1..25: mol_type = other DNA; mol_type = other DNA
cccatcatggaccgtccacctgcat

SEQ ID NO: 6332 - DNA, 25 bp, synthetic construct
  source 1..25: mol_type = other DNA; mol_type = other DNA
cccatcatggaccgtccacctacat

SEQ ID NO: 6333 - DNA, 25 bp, synthetic construct
  source 1..25: mol_type = other DNA; mol_type = other DNA
gcccatcatggaccgtccacctgcg

SEQ ID NO: 6334 - DNA, 25 bp, synthetic construct
  source 1..25: mol_type = other DNA; mol_type = other DNA
gcccatcatggaccgtccacctgca

SEQ ID NO: 6335 - DNA, 25 bp, synthetic construct
  source 1..25: mol_type = other DNA; mol_type = other DNA
gcccatcatggaccgtccacctaca

SEQ ID NO: 6336 - DNA, 25 bp, synthetic construct
  source 1..25: mol_type = other DNA; mol_type = other DNA
tgcccatcatggaccgtccacctgc

SEQ ID NO: 6337 - DNA, 25 bp, synthetic construct
  source 1..25: mol_type = other DNA; mol_type = other DNA
tgcccatcatggaccgtccacctac

SEQ ID NO: 6338 - DNA, 25 bp, synthetic construct
  source 1..25: mol_type = other DNA; mol_type = other DNA
tgcccatcatggaccatccacctac

SEQ ID NO: 6339 - DNA, 25 bp, synthetic construct
  source 1..25: mol_type = other DNA; mol_type = other DNA
ctgcccatcatggaccgtccaccta

SEQ ID NO: 6340 - DNA, 25 bp, synthetic construct
  source 1..25: mol_type = other DNA; mol_type = other DNA
ctgcccatcatggaccatccaccta

SEQ ID NO: 6341 - DNA, 25 bp, synthetic construct
  source 1..25: mol_type = other DNA; mol_type = other DNA
tctgcccatcatggaccgtccacct

SEQ ID NO: 6342 - DNA, 25 bp, synthetic construct
  source 1..25: mol_type = other DNA; mol_type = other DNA
tctgcccatcatggaccatccacct

SEQ ID NO: 6343 - DNA, 25 bp, synthetic construct
  source 1..25: mol_type = other DNA; mol_type = other DNA
tctgcccatcatgaaccatccacct

SEQ ID NO: 6344 - DNA, 25 bp, synthetic construct
  source 1..25: mol_type = other DNA; mol_type = other DNA
gtctgcccatcatggaccgtccacc

SEQ ID NO: 6345 - DNA, 25 bp, synthetic construct
  source 1..25: mol_type = other DNA; mol_type = other DNA
gtctgcccatcatggaccatccacc

SEQ ID NO: 6346 - DNA, 25 bp, synthetic construct
  source 1..25: mol_type = other DNA; mol_type = other DNA
gtctgcccatcatgaaccatccacc

SEQ ID NO: 6347 - DNA, 25 bp, synthetic construct
  source 1..25: mol_type = other DNA; mol_type = other DNA
tgtctgcccatcatggaccatccac

SEQ ID NO: 6348 - DNA, 25 bp, synthetic construct
  source 1..25: mol_type = other DNA; mol_type = other DNA
tgtctgcccatcatgaaccatccac

SEQ ID NO: 6349 - DNA, 25 bp, synthetic construct
  source 1..25: mol_type = other DNA; mol_type = other DNA
ctgtctgcccatcatggaccgtcca

SEQ ID NO: 6350 - DNA, 25 bp, synthetic construct
  source 1..25: mol_type = other DNA; mol_type = other DNA
ctgtctgcccatcatggaccatcca

SEQ ID NO: 6351 - DNA, 25 bp, synthetic construct
  source 1..25: mol_type = other DNA; mol_type = other DNA
ctgtctgcccatcatgaaccatcca

SEQ ID NO: 6352 - DNA, 25 bp, synthetic construct
  source 1..25: mol_type = other DNA; mol_type = other DNA
cctgtctgcccatcatggaccgtcc

SEQ ID NO: 6353 - DNA, 25 bp, synthetic construct
  source 1..25: mol_type = other DNA; mol_type = other DNA
cctgtctgcccatcatggaccatcc

SEQ ID NO: 6354 - DNA, 25 bp, synthetic construct
  source 1..25: mol_type = other DNA; mol_type = other DNA
cctgtctgcccatcatgaaccatcc

SEQ ID NO: 6355 - DNA, 25 bp, synthetic construct
  source 1..25: mol_type = other DNA; mol_type = other DNA
ccctgtctgcccatcatggaccatc

SEQ ID NO: 6356 - DNA, 25 bp, synthetic construct
  source 1..25: mol_type = other DNA; mol_type = other DNA
ccctgtctgcccatcatgaaccatc

SEQ ID NO: 6357 - DNA, 25 bp, synthetic construct
  source 1..25: mol_type = other DNA; mol_type = other DNA
gccctgtctgcccatcatggaccgt

SEQ ID NO: 6358 - DNA, 25 bp, synthetic construct
  source 1..25: mol_type = other DNA; mol_type = other DNA
gccctgtctgcccatcatggaccat

SEQ ID NO: 6359 - DNA, 25 bp, synthetic construct
  source 1..25: mol_type = other DNA; mol_type = other DNA
gccctgtctgcccatcatgaaccat

SEQ ID NO: 6360 - DNA, 25 bp, synthetic construct
  source 1..25: mol_type = other DNA; mol_type = other DNA
ggccctgtctgcccatcatggaccg

SEQ ID NO: 6361 - DNA, 25 bp, synthetic construct
  source 1..25: mol_type = other DNA; mol_type = other DNA
ggccctgtctgcccatcatggacca

SEQ ID NO: 6362 - DNA, 25 bp, synthetic construct
  source 1..25: mol_type = other DNA; mol_type = other DNA
ggccctgtctgcccatcatgaacca

SEQ ID NO: 6363 - DNA, 25 bp, synthetic construct
  source 1..25: mol_type = other DNA; mol_type = other DNA
cggccctgtctgcccatcatgaacc

SEQ ID NO: 6364 - DNA, 25 bp, synthetic construct
  source 1..25: mol_type = other DNA; mol_type = other DNA
cggccctgtctgcccatcataaacc

SEQ ID NO: 6365 - DNA, 25 bp, synthetic construct
  source 1..25: mol_type = other DNA; mol_type = other DNA
ccggccctgtctgcccatcatggac

SEQ ID NO: 6366 - DNA, 25 bp, synthetic construct
  source 1..25: mol_type = other DNA; mol_type = other DNA
ccggccctgtctgcccatcatgaac

SEQ ID NO: 6367 - DNA, 25 bp, synthetic construct
  source 1..25: mol_type = other DNA; mol_type = other DNA
ccggccctgtctgcccatcataaac

SEQ ID NO: 6368 - DNA, 25 bp, synthetic construct
  source 1..25: mol_type = other DNA; mol_type = other DNA
cccggccctgtctgcccatcatgga

SEQ ID NO: 6369 - DNA, 25 bp, synthetic construct
  source 1..25: mol_type = other DNA; mol_type = other DNA
cccggccctgtctgcccatcatgaa

SEQ ID NO: 6370 - DNA, 25 bp, synthetic construct
  source 1..25: mol_type = other DNA; mol_type = other DNA
cccggccctgtctgcccatcataaa

SEQ ID NO: 6371 - DNA, 25 bp, synthetic construct
  source 1..25: mol_type = other DNA; mol_type = other DNA
tcccggccctgtctgcccatcatga

SEQ ID NO: 6372 - DNA, 25 bp, synthetic construct
  source 1..25: mol_type = other DNA; mol_type = other DNA
tcccggccctgtctgcccatcataa

SEQ ID NO: 6373 - DNA, 25 bp, synthetic construct
  source 1..25: mol_type = other DNA; mol_type = other DNA
ctcccggccctgtctgcccatcatg

SEQ ID NO: 6374 - DNA, 25 bp, synthetic construct
  source 1..25: mol_type = other DNA; mol_type = other DNA
ctcccggccctgtctgcccatcata

SEQ ID NO: 6375 - DNA, 25 bp, synthetic construct
  source 1..25: mol_type = other DNA; mol_type = other DNA
ctcccggccctgtctacccatcata

SEQ ID NO: 6376 - DNA, 25 bp, synthetic construct
  source 1..25: mol_type = other DNA; mol_type = other DNA
tctcccggccctgtctgcccatcat

SEQ ID NO: 6377 - DNA, 25 bp, synthetic construct
  source 1..25: mol_type = other DNA; mol_type = other DNA
tctcccggccctgtctacccatcat

SEQ ID NO: 6378 - DNA, 25 bp, synthetic construct
  source 1..25: mol_type = other DNA; mol_type = other DNA
tctcccggccctatctacccatcat

SEQ ID NO: 6379 - DNA, 25 bp, synthetic construct
  source 1..25: mol_type = other DNA; mol_type = other DNA
gtctcccggccctgtctacccatca

SEQ ID NO: 6380 - DNA, 25 bp, synthetic construct
  source 1..25: mol_type = other DNA; mol_type = other DNA
gtctcccggccctatctacccatca

SEQ ID NO: 6381 - DNA, 25 bp, synthetic construct
  source 1..25: mol_type = other DNA; mol_type = other DNA
tgtctcccggccctgtctgcccatc

SEQ ID NO: 6382 - DNA, 25 bp, synthetic construct
  source 1..25: mol_type = other DNA; mol_type = other DNA
tgtctcccggccctgtctacccatc

SEQ ID NO: 6383 - DNA, 25 bp, synthetic construct
  source 1..25: mol_type = other DNA; mol_type = other DNA
tgtctcccggccctatctacccatc

SEQ ID NO: 6384 - DNA, 25 bp, synthetic construct
  source 1..25: mol_type = other DNA; mol_type = other DNA
gtgtctcccggccctgtctgcccat

SEQ ID NO: 6385 - DNA, 25 bp, synthetic construct
  source 1..25: mol_type = other DNA; mol_type = other DNA
gtgtctcccggccctgtctacccat

SEQ ID NO: 6386 - DNA, 25 bp, synthetic construct
  source 1..25: mol_type = other DNA; mol_type = other DNA
gtgtctcccggccctatctacccat

SEQ ID NO: 6387 - DNA, 25 bp, synthetic construct
  source 1..25: mol_type = other DNA; mol_type = other DNA
tgtgtctcccggccctgtctaccca

SEQ ID NO: 6388 - DNA, 25 bp, synthetic construct
  source 1..25: mol_type = other DNA; mol_type = other DNA
tgtgtctcccggccctatctaccca

SEQ ID NO: 6389 - DNA, 25 bp, synthetic construct
  source 1..25: mol_type = other DNA; mol_type = other DNA
ctgtgtctcccggccctgtctgccc

SEQ ID NO: 6390 - DNA, 25 bp, synthetic construct
  source 1..25: mol_type = other DNA; mol_type = other DNA
ctgtgtctcccggccctgtctaccc

SEQ ID NO: 6391 - DNA, 25 bp, synthetic construct
  source 1..25: mol_type = other DNA; mol_type = other DNA
ctgtgtctcccggccctatctaccc

SEQ ID NO: 6392 - DNA, 25 bp, synthetic construct
  source 1..25: mol_type = other DNA; mol_type = other DNA
cctgtgtctcccggccctgtctgcc

SEQ ID NO: 6393 - DNA, 25 bp, synthetic construct
  source 1..25: mol_type = other DNA; mol_type = other DNA
cctgtgtctcccggccctgtctacc

SEQ ID NO: 6394 - DNA, 25 bp, synthetic construct
  source 1..25: mol_type = other DNA; mol_type = other DNA
cctgtgtctcccggccctatctacc

SEQ ID NO: 6395 - DNA, 25 bp, synthetic construct
  source 1..25: mol_type = other DNA; mol_type = other DNA
acctgtgtctcccggccctgtctac

SEQ ID NO: 6396 - DNA, 25 bp, synthetic construct
  source 1..25: mol_type = other DNA; mol_type = other DNA
acctgtgtctcccggccctatctac

SEQ ID NO: 6397 - DNA, 25 bp, synthetic construct
  source 1..25: mol_type = other DNA; mol_type = other DNA
cacctgtgtctcccggccctgtctg

SEQ ID NO: 6398 - DNA, 25 bp, synthetic construct
  source 1..25: mol_type = other DNA; mol_type = other DNA
cacctgtgtctcccggccctgtcta

SEQ ID NO: 6399 - DNA, 25 bp, synthetic construct
  source 1..25: mol_type = other DNA; mol_type = other DNA
cacctgtgtctcccggccctatcta

SEQ ID NO: 6400 - DNA, 25 bp, synthetic construct
  source 1..25: mol_type = other DNA; mol_type = other DNA
ccacctgtgtctcccggccctgtct

SEQ ID NO: 6401 - DNA, 25 bp, synthetic construct
  source 1..25: mol_type = other DNA; mol_type = other DNA
ccacctgtgtctcccggccctatct

SEQ ID NO: 6402 - DNA, 25 bp, synthetic construct
  source 1..25: mol_type = other DNA; mol_type = other DNA
ccacctgtgtctcccgaccctatct

SEQ ID NO: 6403 - DNA, 25 bp, synthetic construct
  source 1..25: mol_type = other DNA; mol_type = other DNA
accacctgtgtctcccggccctatc

SEQ ID NO: 6404 - DNA, 25 bp, synthetic construct
  source 1..25: mol_type = other DNA; mol_type = other DNA
accacctgtgtctcccgaccctatc

SEQ ID NO: 6405 - DNA, 25 bp, synthetic construct
  source 1..25: mol_type = other DNA; mol_type = other DNA
taccacctgtgtctcccggccctgt

SEQ ID NO: 6406 - DNA, 25 bp, synthetic construct
  source 1..25: mol_type = other DNA; mol_type = other DNA
taccacctgtgtctcccggccctat

SEQ ID NO: 6407 - DNA, 25 bp, synthetic construct
  source 1..25: mol_type = other DNA; mol_type = other DNA
taccacctgtgtctcccgaccctat

SEQ ID NO: 6408 - DNA, 25 bp, synthetic construct
  source 1..25: mol_type = other DNA; mol_type = other DNA
gtaccacctgtgtctcccggccctg

SEQ ID NO: 6409 - DNA, 25 bp, synthetic construct
  source 1..25: mol_type = other DNA; mol_type = other DNA
gtaccacctgtgtctcccggcccta

SEQ ID NO: 6410 - DNA, 25 bp, synthetic construct
  source 1..25: mol_type = other DNA; mol_type = other DNA
gtaccacctgtgtctcccgacccta

SEQ ID NO: 6411 - DNA, 25 bp, synthetic construct
  source 1..25: mol_type = other DNA; mol_type = other DNA
cgtaccacctgtgtctcccgaccct

SEQ ID NO: 6412 - DNA, 25 bp, synthetic construct
  source 1..25: mol_type = other DNA; mol_type = other DNA
cgtaccacctgtgtctcccaaccct

SEQ ID NO: 6413 - DNA, 25 bp, synthetic construct
  source 1..25: mol_type = other DNA; mol_type = other DNA
ccgtaccacctgtgtctcccggccc

SEQ ID NO: 6414 - DNA, 25 bp, synthetic construct
  source 1..25: mol_type = other DNA; mol_type = other DNA
ccgtaccacctgtgtctcccgaccc

SEQ ID NO: 6415 - DNA, 25 bp, synthetic construct
  source 1..25: mol_type = other DNA; mol_type = other DNA
ccgtaccacctgtgtctcccaaccc

SEQ ID NO: 6416 - DNA, 25 bp, synthetic construct
  source 1..25: mol_type = other DNA; mol_type = other DNA
cccgtaccacctgtgtctcccggcc

SEQ ID NO: 6417 - DNA, 25 bp, synthetic construct
  source 1..25: mol_type = other DNA; mol_type = other DNA
cccgtaccacctgtgtctcccgacc

SEQ ID NO: 6418 - DNA, 25 bp, synthetic construct
  source 1..25: mol_type = other DNA; mol_type = other DNA
cccgtaccacctgtgtctcccaacc

SEQ ID NO: 6419 - DNA, 25 bp, synthetic construct
  source 1..25: mol_type = other DNA; mol_type = other DNA
tcccgtaccacctgtgtctcccgac

SEQ ID NO: 6420 - DNA, 25 bp, synthetic construct
  source 1..25: mol_type = other DNA; mol_type = other DNA
tcccgtaccacctgtgtctcccaac

SEQ ID NO: 6421 - DNA, 25 bp, synthetic construct
  source 1..25: mol_type = other DNA; mol_type = other DNA
ctcccgtaccacctgtgtctcccgg

SEQ ID NO: 6422 - DNA, 25 bp, synthetic construct
  source 1..25: mol_type = other DNA; mol_type = other DNA
ctcccgtaccacctgtgtctcccga

SEQ ID NO: 6423 - DNA, 25 bp, synthetic construct
  source 1..25: mol_type = other DNA; mol_type = other DNA
ctcccgtaccacctgtgtctcccaa

SEQ ID NO: 6424 - DNA, 25 bp, synthetic construct
  source 1..25: mol_type = other DNA; mol_type = other DNA
cctcccgtaccacctgtgtctcccg

SEQ ID NO: 6425 - DNA, 25 bp, synthetic construct
  source 1..25: mol_type = other DNA; mol_type = other DNA
cctcccgtaccacctgtgtctccca

SEQ ID NO: 6426 - DNA, 25 bp, synthetic construct
  source 1..25: mol_type = other DNA; mol_type = other DNA
cctcccgtaccacctgtatctccca

SEQ ID NO: 6427 - DNA, 25 bp, synthetic construct
  source 1..25: mol_type = other DNA; mol_type = other DNA
ccctcccgtaccacctgtatctccc

SEQ ID NO: 6428 - DNA, 25 bp, synthetic construct
  source 1..25: mol_type = other DNA; mol_type = other DNA
ccctcccgtaccacctatatctccc

SEQ ID NO: 6429 - DNA, 25 bp, synthetic construct
  source 1..25: mol_type = other DNA; mol_type = other DNA
gccctcccgtaccacctgtgtctcc

SEQ ID NO: 6430 - DNA, 25 bp, synthetic construct
  source 1..25: mol_type = other DNA; mol_type = other DNA
gccctcccgtaccacctgtatctcc

SEQ ID NO: 6431 - DNA, 25 bp, synthetic construct
  source 1..25: mol_type = other DNA; mol_type = other DNA
gccctcccgtaccacctatatctcc

SEQ ID NO: 6432 - DNA, 25 bp, synthetic construct
  source 1..25: mol_type = other DNA; mol_type = other DNA
tgccctcccgtaccacctgtgtctc

SEQ ID NO: 6433 - DNA, 25 bp, synthetic construct
  source 1..25: mol_type = other DNA; mol_type = other DNA
tgccctcccgtaccacctgtatctc

SEQ ID NO: 6434 - DNA, 25 bp, synthetic construct
  source 1..25: mol_type = other DNA; mol_type = other DNA
tgccctcccgtaccacctatatctc

SEQ ID NO: 6435 - DNA, 25 bp, synthetic construct
  source 1..25: mol_type = other DNA; mol_type = other DNA
ctgccctcccgtaccacctgtatct

SEQ ID NO: 6436 - DNA, 25 bp, synthetic construct
  source 1..25: mol_type = other DNA; mol_type = other DNA
ctgccctcccgtaccacctatatct

SEQ ID NO: 6437 - DNA, 25 bp, synthetic construct
  source 1..25: mol_type = other DNA; mol_type = other DNA
cctgccctcccgtaccacctgtgtc

SEQ ID NO: 6438 - DNA, 25 bp, synthetic construct
  source 1..25: mol_type = other DNA; mol_type = other DNA
cctgccctcccgtaccacctgtatc

SEQ ID NO: 6439 - DNA, 25 bp, synthetic construct
  source 1..25: mol_type = other DNA; mol_type = other DNA
cctgccctcccgtaccacctatatc

SEQ ID NO: 6440 - DNA, 25 bp, synthetic construct
  source 1..25: mol_type = other DNA; mol_type = other DNA
gcctgccctcccgtaccacctgtgt

SEQ ID NO: 6441 - DNA, 25 bp, synthetic construct
  source 1..25: mol_type = other DNA; mol_type = other DNA
gcctgccctcccgtaccacctgtat

SEQ ID NO: 6442 - DNA, 25 bp, synthetic construct
  source 1..25: mol_type = other DNA; mol_type = other DNA
gcctgccctcccgtaccacctatat

SEQ ID NO: 6443 - DNA, 25 bp, synthetic construct
  source 1..25: mol_type = other DNA; mol_type = other DNA
cgcctgccctcccgtaccacctgta

SEQ ID NO: 6444 - DNA, 25 bp, synthetic construct
  source 1..25: mol_type = other DNA; mol_type = other DNA
cgcctgccctcccgtaccacctata

SEQ ID NO: 6445 - DNA, 25 bp, synthetic construct
  source 1..25: mol_type = other DNA; mol_type = other DNA
ccgcctgccctcccgtaccacctgt

SEQ ID NO: 6446 - DNA, 25 bp, synthetic construct
  source 1..25: mol_type = other DNA; mol_type = other DNA
ccgcctgccctcccgtaccacctat

SEQ ID NO: 6447 - DNA, 25 bp, synthetic construct
  source 1..25: mol_type = other DNA; mol_type = other DNA
ccgcctgccctcccataccacctat

SEQ ID NO: 6448 - DNA, 25 bp, synthetic construct
  source 1..25: mol_type = other DNA; mol_type = other DNA
accgcctgccctcccgtaccacctg

SEQ ID NO: 6449 - DNA, 25 bp, synthetic construct
  source 1..25: mol_type = other DNA; mol_type = other DNA
accgcctgccctcccgtaccaccta

SEQ ID NO: 6450 - DNA, 25 bp, synthetic construct
  source 1..25: mol_type = other DNA; mol_type = other DNA
accgcctgccctcccataccaccta

SEQ ID NO: 6451 - DNA, 25 bp, synthetic construct
  source 1..25: mol_type = other DNA; mol_type = other DNA
gaccgcctgccctcccataccacct

SEQ ID NO: 6452 - DNA, 25 bp, synthetic construct
  source 1..25: mol_type = other DNA; mol_type = other DNA
gaccgcctaccctcccataccacct

SEQ ID NO: 6453 - DNA, 25 bp, synthetic construct
  source 1..25: mol_type = other DNA; mol_type = other DNA
ggaccgcctgccctcccgtaccacc

SEQ ID NO: 6454 - DNA, 25 bp, synthetic construct
  source 1..25: mol_type = other DNA; mol_type = other DNA
ggaccgcctgccctcccataccacc

SEQ ID NO: 6455 - DNA, 25 bp, synthetic construct
  source 1..25: mol_type = other DNA; mol_type = other DNA
ggaccgcctaccctcccataccacc

SEQ ID NO: 6456 - DNA, 25 bp, synthetic construct
  source 1..25: mol_type = other DNA; mol_type = other DNA
cccaccccatccctctcaccaccac

SEQ ID NO: 6457 - DNA, 25 bp, synthetic construct
  source 1..25: mol_type = other DNA; mol_type = other DNA
tccccaccccatccctctcaccacc

SEQ ID NO: 6458 - DNA, 25 bp, synthetic construct
  source 1..25: mol_type = other DNA; mol_type = other DNA
ttccccaccccatccctctcaccac

SEQ ID NO: 6459 - DNA, 25 bp, synthetic construct
  source 1..25: mol_type = other DNA; mol_type = other DNA
atttccccaccccatccctctcacc

SEQ ID NO: 6460 - DNA, 25 bp, synthetic construct
  source 1..25: mol_type = other DNA; mol_type = other DNA
catttccccaccccatccctctcac

SEQ ID NO: 6461 - DNA, 25 bp, synthetic construct
  source 1..25: mol_type = other DNA; mol_type = other DNA
ctcatttccccaccccatccctctc

SEQ ID NO: 6462 - DNA, 25 bp, synthetic construct
  source 1..25: mol_type = other DNA; mol_type = other DNA
actcatttccccaccccatccctct

SEQ ID NO: 6463 - DNA, 25 bp, synthetic construct
  source 1..25: mol_type = other DNA; mol_type = other DNA
acactcatttccccaccccatccct

SEQ ID NO: 6464 - DNA, 25 bp, synthetic construct
  source 1..25: mol_type = other DNA; mol_type = other DNA
cacactcatttccccaccccatccc

SEQ ID NO: 6465 - DNA, 25 bp, synthetic construct
  source 1..25: mol_type = other DNA; mol_type = other DNA
tccacactcatttccccaccccatc

SEQ ID NO: 6466 - DNA, 25 bp, synthetic construct
  source 1..25: mol_type = other DNA; mol_type = other DNA
atccacactcatttccccaccccat

SEQ ID NO: 6467 - DNA, 25 bp, synthetic construct
  source 1..25: mol_type = other DNA; mol_type = other DNA
ttatccacactcatttccccacccc

SEQ ID NO: 6468 - DNA, 25 bp, synthetic construct
  source 1..25: mol_type = other DNA; mol_type = other DNA
attatccacactcatttccccaccc

SEQ ID NO: 6469 - DNA, 25 bp, synthetic construct
  source 1..25: mol_type = other DNA; mol_type = other DNA
ccattatccacactcatttccccac

SEQ ID NO: 6470 - DNA, 25 bp, synthetic construct
  source 1..25: mol_type = other DNA; mol_type = other DNA
cccattatccacactcatttcccca

SEQ ID NO: 6471 - DNA, 25 bp, synthetic construct
  source 1..25: mol_type = other DNA; mol_type = other DNA
gccccattatccacactcatttccc

SEQ ID NO: 6472 - DNA, 25 bp, synthetic construct
  source 1..25: mol_type = other DNA; mol_type = other DNA
accccattatccacactcatttccc

SEQ ID NO: 6473 - DNA, 25 bp, synthetic construct
  source 1..25: mol_type = other DNA; mol_type = other DNA
ggccccattatccacactcatttcc

SEQ ID NO: 6474 - DNA, 25 bp, synthetic construct
  source 1..25: mol_type = other DNA; mol_type = other DNA
gaccccattatccacactcatttcc

SEQ ID NO: 6475 - DNA, 25 bp, synthetic construct
  source 1..25: mol_type = other DNA; mol_type = other DNA
aaccccattatccacactcatttcc

SEQ ID NO: 6476 - DNA, 25 bp, synthetic construct
  source 1..25: mol_type = other DNA; mol_type = other DNA
ggaccccattatccacactcatttc

SEQ ID NO: 6477 - DNA, 25 bp, synthetic construct
  source 1..25: mol_type = other DNA; mol_type = other DNA
gaaccccattatccacactcatttc

SEQ ID NO: 6478 - DNA, 25 bp, synthetic construct
  source 1..25: mol_type = other DNA; mol_type = other DNA
cgggccccattatccacactcattt

SEQ ID NO: 6479 - DNA, 25 bp, synthetic construct
  source 1..25: mol_type = other DNA; mol_type = other DNA
cggaccccattatccacactcattt

SEQ ID NO: 6480 - DNA, 25 bp, synthetic construct
  source 1..25: mol_type = other DNA; mol_type = other DNA
cgaaccccattatccacactcattt

SEQ ID NO: 6481 - DNA, 25 bp, synthetic construct
  source 1..25: mol_type = other DNA; mol_type = other DNA
ccgggccccattatccacactcatt

SEQ ID NO: 6482 - DNA, 25 bp, synthetic construct
  source 1..25: mol_type = other DNA; mol_type = other DNA
ccggaccccattatccacactcatt

SEQ ID NO: 6483 - DNA, 25 bp, synthetic construct
  source 1..25: mol_type = other DNA; mol_type = other DNA
ccgaaccccattatccacactcatt

SEQ ID NO: 6484 - DNA, 25 bp, synthetic construct
  source 1..25: mol_type = other DNA; mol_type = other DNA
cccggaccccattatccacactcat

SEQ ID NO: 6485 - DNA, 25 bp, synthetic construct
  source 1..25: mol_type = other DNA; mol_type = other DNA
cccgaaccccattatccacactcat

SEQ ID NO: 6486 - DNA, 25 bp, synthetic construct
  source 1..25: mol_type = other DNA; mol_type = other DNA
acccgggccccattatccacactca

SEQ ID NO: 6487 - DNA, 25 bp, synthetic construct
  source 1..25: mol_type = other DNA; mol_type = other DNA
acccggaccccattatccacactca

SEQ ID NO: 6488 - DNA, 25 bp, synthetic construct
  source 1..25: mol_type = other DNA; mol_type = other DNA
acccgaaccccattatccacactca

SEQ ID NO: 6489 - DNA, 25 bp, synthetic construct
  source 1..25: mol_type = other DNA; mol_type = other DNA
cacccgggccccattatccacactc

SEQ ID NO: 6490 - DNA, 25 bp, synthetic construct
  source 1..25: mol_type = other DNA; mol_type = other DNA
cacccggaccccattatccacactc

SEQ ID NO: 6491 - DNA, 25 bp, synthetic construct
  source 1..25: mol_type = other DNA; mol_type = other DNA
cacccgaaccccattatccacactc

SEQ ID NO: 6492 - DNA, 25 bp, synthetic construct
  source 1..25: mol_type = other DNA; mol_type = other DNA
gcacccggaccccattatccacact

SEQ ID NO: 6493 - DNA, 25 bp, synthetic construct
  source 1..25: mol_type = other DNA; mol_type = other DNA
gcacccgaaccccattatccacact

SEQ ID NO: 6494 - DNA, 25 bp, synthetic construct
  source 1..25: mol_type = other DNA; mol_type = other DNA
ggcacccgggccccattatccacac

SEQ ID NO: 6495 - DNA, 25 bp, synthetic construct
  source 1..25: mol_type = other DNA; mol_type = other DNA
ggcacccggaccccattatccacac

SEQ ID NO: 6496 - DNA, 25 bp, synthetic construct
  source 1..25: mol_type = other DNA; mol_type = other DNA
ggcacccgaaccccattatccacac

SEQ ID NO: 6497 - DNA, 25 bp, synthetic construct
  source 1..25: mol_type = other DNA; mol_type = other DNA
cggcacccgggccccattatccaca

SEQ ID NO: 6498 - DNA, 25 bp, synthetic construct
  source 1..25: mol_type = other DNA; mol_type = other DNA
cggcacccggaccccattatccaca

SEQ ID NO: 6499 - DNA, 25 bp, synthetic construct
  source 1..25: mol_type = other DNA; mol_type = other DNA
cggcacccgaaccccattatccaca

SEQ ID NO: 6500 - DNA, 25 bp, synthetic construct
  source 1..25: mol_type = other DNA; mol_type = other DNA
tcggcacccggaccccattatccac

SEQ ID NO: 6501 - DNA, 25 bp, synthetic construct
  source 1..25: mol_type = other DNA; mol_type = other DNA
tcggcacccgaaccccattatccac

SEQ ID NO: 6502 - DNA, 25 bp, synthetic construct
  source 1..25: mol_type = other DNA; mol_type = other DNA
ctcggcacccgggccccattatcca

SEQ ID NO: 6503 - DNA, 25 bp, synthetic construct
  source 1..25: mol_type = other DNA; mol_type = other DNA
ctcggcacccggaccccattatcca

SEQ ID NO: 6504 - DNA, 25 bp, synthetic construct
  source 1..25: mol_type = other DNA; mol_type = other DNA
ctcggcacccgaaccccattatcca

SEQ ID NO: 6505 - DNA, 25 bp, synthetic construct
  source 1..25: mol_type = other DNA; mol_type = other DNA
gctcggcacccgggccccattatcc

SEQ ID NO: 6506 - DNA, 25 bp, synthetic construct
  source 1..25: mol_type = other DNA; mol_type = other DNA
gctcggcacccggaccccattatcc

SEQ ID NO: 6507 - DNA, 25 bp, synthetic construct
  source 1..25: mol_type = other DNA; mol_type = other DNA
gctcggcacccgaaccccattatcc

SEQ ID NO: 6508 - DNA, 25 bp, synthetic construct
  source 1..25: mol_type = other DNA; mol_type = other DNA
ggctcggcacccggaccccattatc

SEQ ID NO: 6509 - DNA, 25 bp, synthetic construct
  source 1..25: mol_type = other DNA; mol_type = other DNA
ggctcggcacccgaaccccattatc

SEQ ID NO: 6510 - DNA, 25 bp, synthetic construct
  source 1..25: mol_type = other DNA; mol_type = other DNA
aggctcggcacccgggccccattat

SEQ ID NO: 6511 - DNA, 25 bp, synthetic construct
  source 1..25: mol_type = other DNA; mol_type = other DNA
aggctcggcacccggaccccattat

SEQ ID NO: 6512 - DNA, 25 bp, synthetic construct
  source 1..25: mol_type = other DNA; mol_type = other DNA
aggctcggcacccgaaccccattat

SEQ ID NO: 6513 - DNA, 25 bp, synthetic construct
  source 1..25: mol_type = other DNA; mol_type = other DNA
caggctcggcacccgggccccatta

SEQ ID NO: 6514 - DNA, 25 bp, synthetic construct
  source 1..25: mol_type = other DNA; mol_type = other DNA
caggctcggcacccggaccccatta

SEQ ID NO: 6515 - DNA, 25 bp, synthetic construct
  source 1..25: mol_type = other DNA; mol_type = other DNA
caggctcggcacccgaaccccatta

SEQ ID NO: 6516 - DNA, 25 bp, synthetic construct
  source 1..25: mol_type = other DNA; mol_type = other DNA
gcaggctcggcacccggaccccatt

SEQ ID NO: 6517 - DNA, 25 bp, synthetic construct
  source 1..25: mol_type = other DNA; mol_type = other DNA
gcaggctcggcacccgaaccccatt

SEQ ID NO: 6518 - DNA, 25 bp, synthetic construct
  source 1..25: mol_type = other DNA; mol_type = other DNA
ggcaggctcggcacccgggccccat

SEQ ID NO: 6519 - DNA, 25 bp, synthetic construct
  source 1..25: mol_type = other DNA; mol_type = other DNA
ggcaggctcggcacccggaccccat

SEQ ID NO: 6520 - DNA, 25 bp, synthetic construct
  source 1..25: mol_type = other DNA; mol_type = other DNA
ggcaggctcggcacccgaaccccat

SEQ ID NO: 6521 - DNA, 25 bp, synthetic construct
  source 1..25: mol_type = other DNA; mol_type = other DNA
aggcaggctcggcacccgggcccca

SEQ ID NO: 6522 - DNA, 25 bp, synthetic construct
  source 1..25: mol_type = other DNA; mol_type = other DNA
aggcaggctcggcacccggacccca

SEQ ID NO: 6523 - DNA, 25 bp, synthetic construct
  source 1..25: mol_type = other DNA; mol_type = other DNA
aggcaggctcggcacccgaacccca

SEQ ID NO: 6524 - DNA, 25 bp, synthetic construct
  source 1..25: mol_type = other DNA; mol_type = other DNA
gaggcaggctcggcacccggacccc

SEQ ID NO: 6525 - DNA, 25 bp, synthetic construct
  source 1..25: mol_type = other DNA; mol_type = other DNA
gaggcaggctcggcacccgaacccc

SEQ ID NO: 6526 - DNA, 25 bp, synthetic construct
  source 1..25: mol_type = other DNA; mol_type = other DNA
agaggcaggctcggcacccgggccc

SEQ ID NO: 6527 - DNA, 25 bp, synthetic construct
  source 1..25: mol_type = other DNA; mol_type = other DNA
agaggcaggctcggcacccggaccc

SEQ ID NO: 6528 - DNA, 25 bp, synthetic construct
  source 1..25: mol_type = other DNA; mol_type = other DNA
agaggcaggctcggcacccgaaccc

SEQ ID NO: 6529 - DNA, 25 bp, synthetic construct
  source 1..25: mol_type = other DNA; mol_type = other DNA
aagaggcaggctcggcacccgggcc

SEQ ID NO: 6530 - DNA, 25 bp, synthetic construct
  source 1..25: mol_type = other DNA; mol_type = other DNA
aagaggcaggctcggcacccggacc

SEQ ID NO: 6531 - DNA, 25 bp, synthetic construct
  source 1..25: mol_type = other DNA; mol_type = other DNA
aagaggcaggctcggcacccgaacc

SEQ ID NO: 6532 - DNA, 25 bp, synthetic construct
  source 1..25: mol_type = other DNA; mol_type = other DNA
taagaggcaggctcggcacccggac

SEQ ID NO: 6533 - DNA, 25 bp, synthetic construct
  source 1..25: mol_type = other DNA; mol_type = other DNA
taagaggcaggctcggcacccgaac

SEQ ID NO: 6534 - DNA, 25 bp, synthetic construct
  source 1..25: mol_type = other DNA; mol_type = other DNA
gtaagaggcaggctcggcacccggg

SEQ ID NO: 6535 - DNA, 25 bp, synthetic construct
  source 1..25: mol_type = other DNA; mol_type = other DNA
gtaagaggcaggctcggcacccgga

SEQ ID NO: 6536 - DNA, 25 bp, synthetic construct
  source 1..25: mol_type = other DNA; mol_type = other DNA
gtaagaggcaggctcggcacccgaa

SEQ ID NO: 6537 - DNA, 25 bp, synthetic construct
  source 1..25: mol_type = other DNA; mol_type = other DNA
agtaagaggcaggctcggcacccgg

SEQ ID NO: 6538 - DNA, 25 bp, synthetic construct
  source 1..25: mol_type = other DNA; mol_type = other DNA
agtaagaggcaggctcggcacccga

SEQ ID NO: 6539 - DNA, 25 bp, synthetic construct
  source 1..25: mol_type = other DNA; mol_type = other DNA
agtaagaggcaggctcggcacccaa

SEQ ID NO: 6540 - DNA, 25 bp, synthetic construct
  source 1..25: mol_type = other DNA; mol_type = other DNA
gagtaagaggcaggctcggcaccca

SEQ ID NO: 6541 - DNA, 25 bp, synthetic construct
  source 1..25: mol_type = other DNA; mol_type = other DNA
gagtaagaggcaggctcgacaccca

SEQ ID NO: 6542 - DNA, 25 bp, synthetic construct
  source 1..25: mol_type = other DNA; mol_type = other DNA
ggagtaagaggcaggctcggcaccc

SEQ ID NO: 6543 - DNA, 25 bp, synthetic construct
  source 1..25: mol_type = other DNA; mol_type = other DNA
ggagtaagaggcaggctcgacaccc

SEQ ID NO: 6544 - DNA, 25 bp, synthetic construct
  source 1..25: mol_type = other DNA; mol_type = other DNA
ggagtaagaggcaggctcaacaccc

SEQ ID NO: 6545 - DNA, 25 bp, synthetic construct
  source 1..25: mol_type = other DNA; mol_type = other DNA
gggagtaagaggcaggctcggcacc

SEQ ID NO: 6546 - DNA, 25 bp, synthetic construct
  source 1..25: mol_type = other DNA; mol_type = other DNA
gggagtaagaggcaggctcgacacc

SEQ ID NO: 6547 - DNA, 25 bp, synthetic construct
  source 1..25: mol_type = other DNA; mol_type = other DNA
gggagtaagaggcaggctcaacacc

SEQ ID NO: 6548 - DNA, 25 bp, synthetic construct
  source 1..25: mol_type = other DNA; mol_type = other DNA
agggagtaagaggcaggctcgacac

SEQ ID NO: 6549 - DNA, 25 bp, synthetic construct
  source 1..25: mol_type = other DNA; mol_type = other DNA
agggagtaagaggcaggctcaacac

SEQ ID NO: 6550 - DNA, 25 bp, synthetic construct
  source 1..25: mol_type = other DNA; mol_type = other DNA
aagggagtaagaggcaggctcggca

SEQ ID NO: 6551 - DNA, 25 bp, synthetic construct
  source 1..25: mol_type = other DNA; mol_type = other DNA
aagggagtaagaggcaggctcgaca

SEQ ID NO: 6552 - DNA, 25 bp, synthetic construct
  source 1..25: mol_type = other DNA; mol_type = other DNA
aagggagtaagaggcaggctcaaca

SEQ ID NO: 6553 - DNA, 25 bp, synthetic construct
  source 1..25: mol_type = other DNA; mol_type = other DNA
aaagggagtaagaggcaggctcggc

SEQ ID NO: 6554 - DNA, 25 bp, synthetic construct
  source 1..25: mol_type = other DNA; mol_type = other DNA
aaagggagtaagaggcaggctcgac

SEQ ID NO: 6555 - DNA, 25 bp, synthetic construct
  source 1..25: mol_type = other DNA; mol_type = other DNA
aaagggagtaagaggcaggctcaac

SEQ ID NO: 6556 - DNA, 25 bp, synthetic construct
  source 1..25: mol_type = other DNA; mol_type = other DNA
taaagggagtaagaggcaggctcga

SEQ ID NO: 6557 - DNA, 25 bp, synthetic construct
  source 1..25: mol_type = other DNA; mol_type = other DNA
taaagggagtaagaggcaggctcaa

SEQ ID NO: 6558 - DNA, 25 bp, synthetic construct
  source 1..25: mol_type = other DNA; mol_type = other DNA
gtaaagggagtaagaggcaggctcg

SEQ ID NO: 6559 - DNA, 25 bp, synthetic construct
  source 1..25: mol_type = other DNA; mol_type = other DNA
gtaaagggagtaagaggcaggctca

SEQ ID NO: 6560 - DNA, 25 bp, synthetic construct
  source 1..25: mol_type = other DNA; mol_type = other DNA
gtaaagggagtaagaggcagactca

SEQ ID NO: 6561 - DNA, 25 bp, synthetic construct
  source 1..25: mol_type = other DNA; mol_type = other DNA
agtaaagggagtaagaggcaggctc

SEQ ID NO: 6562 - DNA, 25 bp, synthetic construct
  source 1..25: mol_type = other DNA; mol_type = other DNA
agtaaagggagtaagaggcagactc

SEQ ID NO: 6563 - DNA, 25 bp, synthetic construct
  source 1..25: mol_type = other DNA; mol_type = other DNA
agtaaagggagtaagaggcaaactc

SEQ ID NO: 6564 - DNA, 25 bp, synthetic construct
  source 1..25: mol_type = other DNA; mol_type = other DNA
gagtaaagggagtaagaggcagact

SEQ ID NO: 6565 - DNA, 25 bp, synthetic construct
  source 1..25: mol_type = other DNA; mol_type = other DNA
gagtaaagggagtaagaggcaaact

SEQ ID NO: 6566 - DNA, 25 bp, synthetic construct
  source 1..25: mol_type = other DNA; mol_type = other DNA
agagtaaagggagtaagaggcaggc

SEQ ID NO: 6567 - DNA, 25 bp, synthetic construct
  source 1..25: mol_type = other DNA; mol_type = other DNA
agagtaaagggagtaagaggcagac

SEQ ID NO: 6568 - DNA, 25 bp, synthetic construct
  source 1..25: mol_type = other DNA; mol_type = other DNA
agagtaaagggagtaagaggcaaac

SEQ ID NO: 6569 - DNA, 25 bp, synthetic construct
  source 1..25: mol_type = other DNA; mol_type = other DNA
cagagtaaagggagtaagaggcagg

SEQ ID NO: 6570 - DNA, 25 bp, synthetic construct
  source 1..25: mol_type = other DNA; mol_type = other DNA
cagagtaaagggagtaagaggcaga

SEQ ID NO: 6571 - DNA, 25 bp, synthetic construct
  source 1..25: mol_type = other DNA; mol_type = other DNA
cagagtaaagggagtaagaggcaaa

SEQ ID NO: 6572 - DNA, 25 bp, synthetic construct
  source 1..25: mol_type = other DNA; mol_type = other DNA
acagagtaaagggagtaagaggcaa

SEQ ID NO: 6573 - DNA, 25 bp, synthetic construct
  source 1..25: mol_type = other DNA; mol_type = other DNA
acagagtaaagggagtaagagacaa

SEQ ID NO: 6574 - DNA, 25 bp, synthetic construct
  source 1..25: mol_type = other DNA; mol_type = other DNA
aacagagtaaagggagtaagaggca

SEQ ID NO: 6575 - DNA, 25 bp, synthetic construct
  source 1..25: mol_type = other DNA; mol_type = other DNA
aacagagtaaagggagtaagagaca

SEQ ID NO: 6576 - DNA, 25 bp, synthetic construct
  source 1..25: mol_type = other DNA; mol_type = other DNA
aacagagtaaagggagtaagaaaca

SEQ ID NO: 6577 - DNA, 25 bp, synthetic construct
  source 1..25: mol_type = other DNA; mol_type = other DNA
aaacagagtaaagggagtaagaggc

SEQ ID NO: 6578 - DNA, 25 bp, synthetic construct
  source 1..25: mol_type = other DNA; mol_type = other DNA
aaacagagtaaagggagtaagagac

SEQ ID NO: 6579 - DNA, 25 bp, synthetic construct
  source 1..25: mol_type = other DNA; mol_type = other DNA
aaacagagtaaagggagtaagaaac

SEQ ID NO: 6580 - DNA, 25 bp, synthetic construct
  source 1..25: mol_type = other DNA; mol_type = other DNA
gaaacagagtaaagggagtaagaga

SEQ ID NO: 6581 - DNA, 25 bp, synthetic construct
  source 1..25: mol_type = other DNA; mol_type = other DNA
gaaacagagtaaagggagtaagaaa

SEQ ID NO: 6582 - DNA, 25 bp, synthetic construct
  source 1..25: mol_type = other DNA; mol_type = other DNA
agaaacagagtaaagggagtaagag

SEQ ID NO: 6583 - DNA, 25 bp, synthetic construct
  source 1..25: mol_type = other DNA; mol_type = other DNA
agaaacagagtaaagggagtaagaa

SEQ ID NO: 6584 - DNA, 25 bp, synthetic construct
  source 1..25: mol_type = other DNA; mol_type = other DNA
agaaacagagtaaagggagtaaaaa

SEQ ID NO: 6585 - DNA, 25 bp, synthetic construct
  source 1..25: mol_type = other DNA; mol_type = other DNA
aagaaacagagtaaagggagtaaga

SEQ ID NO: 6586 - DNA, 25 bp, synthetic construct
  source 1..25: mol_type = other DNA; mol_type = other DNA
aagaaacagagtaaagggagtaaaa

SEQ ID NO: 6587 - DNA, 25 bp, synthetic construct
  source 1..25: mol_type = other DNA; mol_type = other DNA
aagaaacagagtaaagggaataaaa

SEQ ID NO: 6588 - DNA, 25 bp, synthetic construct
  source 1..25: mol_type = other DNA; mol_type = other DNA
caagaaacagagtaaagggagtaaa

SEQ ID NO: 6589 - DNA, 25 bp, synthetic construct
  source 1..25: mol_type = other DNA; mol_type = other DNA
caagaaacagagtaaagggaataaa

SEQ ID NO: 6590 - DNA, 25 bp, synthetic construct
  source 1..25: mol_type = other DNA; mol_type = other DNA
tcaagaaacagagtaaagggagtaa

SEQ ID NO: 6591 - DNA, 25 bp, synthetic construct
  source 1..25: mol_type = other DNA; mol_type = other DNA
tcaagaaacagagtaaagggaataa

SEQ ID NO: 6592 - DNA, 25 bp, synthetic construct
  source 1..25: mol_type = other DNA; mol_type = other DNA
tcaagaaacagagtaaaggaaataa

SEQ ID NO: 6593 - DNA, 25 bp, synthetic construct
  source 1..25: mol_type = other DNA; mol_type = other DNA
atcaagaaacagagtaaagggagta

SEQ ID NO: 6594 - DNA, 25 bp, synthetic construct
  source 1..25: mol_type = other DNA; mol_type = other DNA
atcaagaaacagagtaaagggaata

SEQ ID NO: 6595 - DNA, 25 bp, synthetic construct
  source 1..25: mol_type = other DNA; mol_type = other DNA
atcaagaaacagagtaaaggaaata

SEQ ID NO: 6596 - DNA, 25 bp, synthetic construct
  source 1..25: mol_type = other DNA; mol_type = other DNA
aatcaagaaacagagtaaagggaat

SEQ ID NO: 6597 - DNA, 25 bp, synthetic construct
  source 1..25: mol_type = other DNA; mol_type = other DNA
aatcaagaaacagagtaaaggaaat

SEQ ID NO: 6598 - DNA, 25 bp, synthetic construct
  source 1..25: mol_type = other DNA; mol_type = other DNA
gaatcaagaaacagagtaaagggag

SEQ ID NO: 6599 - DNA, 25 bp, synthetic construct
  source 1..25: mol_type = other DNA; mol_type = other DNA
gaatcaagaaacagagtaaagggaa

SEQ ID NO: 6600 - DNA, 25 bp, synthetic construct
  source 1..25: mol_type = other DNA; mol_type = other DNA
gaatcaagaaacagagtaaaggaaa

SEQ ID NO: 6601 - DNA, 25 bp, synthetic construct
  source 1..25: mol_type = other DNA; mol_type = other DNA
ggaatcaagaaacagagtaaaggga

SEQ ID NO: 6602 - DNA, 25 bp, synthetic construct
  source 1..25: mol_type = other DNA; mol_type = other DNA
ggaatcaagaaacagagtaaaggaa

SEQ ID NO: 6603 - DNA, 25 bp, synthetic construct
  source 1..25: mol_type = other DNA; mol_type = other DNA
ggaatcaagaaacagagtaaagaaa

SEQ ID NO: 6604 - DNA, 25 bp, synthetic construct
  source 1..25: mol_type = other DNA; mol_type = other DNA
tggaatcaagaaacagagtaaagga

SEQ ID NO: 6605 - DNA, 25 bp, synthetic construct
  source 1..25: mol_type = other DNA; mol_type = other DNA
tggaatcaagaaacagagtaaagaa

SEQ ID NO: 6606 - DNA, 25 bp, synthetic construct
  source 1..25: mol_type = other DNA; mol_type = other DNA
ttggaatcaagaaacagagtaaagg

SEQ ID NO: 6607 - DNA, 25 bp, synthetic construct
  source 1..25: mol_type = other DNA; mol_type = other DNA
ttggaatcaagaaacagagtaaaga

SEQ ID NO: 6608 - DNA, 25 bp, synthetic construct
  source 1..25: mol_type = other DNA; mol_type = other DNA
ttggaatcaagaaacagagtaaaaa

SEQ ID NO: 6609 - DNA, 25 bp, synthetic construct
  source 1..25: mol_type = other DNA; mol_type = other DNA
cttggaatcaagaaacagagtaaag

SEQ ID NO: 6610 - DNA, 25 bp, synthetic construct
  source 1..25: mol_type = other DNA; mol_type = other DNA
cttggaatcaagaaacagagtaaaa

SEQ ID NO: 6611 - DNA, 25 bp, synthetic construct
  source 1..25: mol_type = other DNA; mol_type = other DNA
cttggaatcaagaaacagaataaaa

SEQ ID NO: 6612 - DNA, 25 bp, synthetic construct
  source 1..25: mol_type = other DNA; mol_type = other DNA
cccccttttcttctccgaatggaga

SEQ ID NO: 6613 - DNA, 25 bp, synthetic construct
  source 1..25: mol_type = other DNA; mol_type = other DNA
cccccttttcttctccgaatggaaa

SEQ ID NO: 6614 - DNA, 25 bp, synthetic construct
  source 1..25: mol_type = other DNA; mol_type = other DNA
acccccttttcttctccgaatggag

SEQ ID NO: 6615 - DNA, 25 bp, synthetic construct
  source 1..25: mol_type = other DNA; mol_type = other DNA
acccccttttcttctccgaatggaa

SEQ ID NO: 6616 - DNA, 25 bp, synthetic construct
  source 1..25: mol_type = other DNA; mol_type = other DNA
acccccttttcttctccgaatgaaa

SEQ ID NO: 6617 - DNA, 25 bp, synthetic construct
  source 1..25: mol_type = other DNA; mol_type = other DNA
cacccccttttcttctccgaatgga

SEQ ID NO: 6618 - DNA, 25 bp, synthetic construct
  source 1..25: mol_type = other DNA; mol_type = other DNA
cacccccttttcttctccgaatgaa

SEQ ID NO: 6619 - DNA, 25 bp, synthetic construct
  source 1..25: mol_type = other DNA; mol_type = other DNA
cacccccttttcttctccgaataaa

SEQ ID NO: 6620 - DNA, 25 bp, synthetic construct
  source 1..25: mol_type = other DNA; mol_type = other DNA
tcacccccttttcttctccgaatga

SEQ ID NO: 6621 - DNA, 25 bp, synthetic construct
  source 1..25: mol_type = other DNA; mol_type = other DNA
tcacccccttttcttctccgaataa

SEQ ID NO: 6622 - DNA, 25 bp, synthetic construct
  source 1..25: mol_type = other DNA; mol_type = other DNA
ctcacccccttttcttctccgaatg

SEQ ID NO: 6623 - DNA, 25 bp, synthetic construct
  source 1..25: mol_type = other DNA; mol_type = other DNA
ctcacccccttttcttctccgaata

SEQ ID NO: 6624 - DNA, 25 bp, synthetic construct
  source 1..25: mol_type = other DNA; mol_type = other DNA
ctcacccccttttcttctccaaata

SEQ ID NO: 6625 - DNA, 25 bp, synthetic construct
  source 1..25: mol_type = other DNA; mol_type = other DNA
actcacccccttttcttctccgaat

SEQ ID NO: 6626 - DNA, 25 bp, synthetic construct
  source 1..25: mol_type = other DNA; mol_type = other DNA
actcacccccttttcttctccaaat

SEQ ID NO: 6627 - DNA, 25 bp, synthetic construct
  source 1..25: mol_type = other DNA; mol_type = other DNA
gactcacccccttttcttctccaaa

SEQ ID NO: 6628 - DNA, 25 bp, synthetic construct
  source 1..25: mol_type = other DNA; mol_type = other DNA
aactcacccccttttcttctccaaa

SEQ ID NO: 6629 - DNA, 25 bp, synthetic construct
  source 1..25: mol_type = other DNA; mol_type = other DNA
tgactcacccccttttcttctccga

SEQ ID NO: 6630 - DNA, 25 bp, synthetic construct
  source 1..25: mol_type = other DNA; mol_type = other DNA
tgactcacccccttttcttctccaa

SEQ ID NO: 6631 - DNA, 25 bp, synthetic construct
  source 1..25: mol_type = other DNA; mol_type = other DNA
taactcacccccttttcttctccaa

SEQ ID NO: 6632 - DNA, 25 bp, synthetic construct
  source 1..25: mol_type = other DNA; mol_type = other DNA
atgactcacccccttttcttctccg

SEQ ID NO: 6633 - DNA, 25 bp, synthetic construct
  source 1..25: mol_type = other DNA; mol_type = other DNA
atgactcacccccttttcttctcca

SEQ ID NO: 6634 - DNA, 25 bp, synthetic construct
  source 1..25: mol_type = other DNA; mol_type = other DNA
ataactcacccccttttcttctcca

SEQ ID NO: 6635 - DNA, 25 bp, synthetic construct
  source 1..25: mol_type = other DNA; mol_type = other DNA
gataactcacccccttttcttctcc

SEQ ID NO: 6636 - DNA, 25 bp, synthetic construct
  source 1..25: mol_type = other DNA; mol_type = other DNA
aataactcacccccttttcttctcc

SEQ ID NO: 6637 - DNA, 25 bp, synthetic construct
  source 1..25: mol_type = other DNA; mol_type = other DNA
agatgactcacccccttttcttctc

SEQ ID NO: 6638 - DNA, 25 bp, synthetic construct
  source 1..25: mol_type = other DNA; mol_type = other DNA
agataactcacccccttttcttctc

SEQ ID NO: 6639 - DNA, 25 bp, synthetic construct
  source 1..25: mol_type = other DNA; mol_type = other DNA
aaataactcacccccttttcttctc

SEQ ID NO: 6640 - DNA, 25 bp, synthetic construct
  source 1..25: mol_type = other DNA; mol_type = other DNA
cagatgactcacccccttttcttct

SEQ ID NO: 6641 - DNA, 25 bp, synthetic construct
  source 1..25: mol_type = other DNA; mol_type = other DNA
cagataactcacccccttttcttct

SEQ ID NO: 6642 - DNA, 25 bp, synthetic construct
  source 1..25: mol_type = other DNA; mol_type = other DNA
caaataactcacccccttttcttct

SEQ ID NO: 6643 - DNA, 25 bp, synthetic construct
  source 1..25: mol_type = other DNA; mol_type = other DNA
gcagataactcacccccttttcttc

SEQ ID NO: 6644 - DNA, 25 bp, synthetic construct
  source 1..25: mol_type = other DNA; mol_type = other DNA
gcaaataactcacccccttttcttc

SEQ ID NO: 6645 - DNA, 25 bp, synthetic construct
  source 1..25: mol_type = other DNA; mol_type = other DNA
ggcagatgactcacccccttttctt

SEQ ID NO: 6646 - DNA, 25 bp, synthetic construct
  source 1..25: mol_type = other DNA; mol_type = other DNA
ggcagataactcacccccttttctt

SEQ ID NO: 6647 - DNA, 25 bp, synthetic construct
  source 1..25: mol_type = other DNA; mol_type = other DNA
ggcaaataactcacccccttttctt

SEQ ID NO: 6648 - DNA, 25 bp, synthetic construct
  source 1..25: mol_type = other DNA; mol_type = other DNA
aggcagatgactcacccccttttct

SEQ ID NO: 6649 - DNA, 25 bp, synthetic construct
  source 1..25: mol_type = other DNA; mol_type = other DNA
aggcagataactcacccccttttct

SEQ ID NO: 6650 - DNA, 25 bp, synthetic construct
  source 1..25: mol_type = other DNA; mol_type = other DNA
aggcaaataactcacccccttttct

SEQ ID NO: 6651 - DNA, 25 bp, synthetic construct
  source 1..25: mol_type = other DNA; mol_type = other DNA
caggcagataactcacccccttttc

SEQ ID NO: 6652 - DNA, 25 bp, synthetic construct
  source 1..25: mol_type = other DNA; mol_type = other DNA
caggcaaataactcacccccttttc

SEQ ID NO: 6653 - DNA, 25 bp, synthetic construct
  source 1..25: mol_type = other DNA; mol_type = other DNA
acaggcagatgactcaccccctttt

SEQ ID NO: 6654 - DNA, 25 bp, synthetic construct
  source 1..25: mol_type = other DNA; mol_type = other DNA
acaggcagataactcaccccctttt

SEQ ID NO: 6655 - DNA, 25 bp, synthetic construct
  source 1..25: mol_type = other DNA; mol_type = other DNA
acaggcaaataactcaccccctttt

SEQ ID NO: 6656 - DNA, 25 bp, synthetic construct
  source 1..25: mol_type = other DNA; mol_type = other DNA
cacaggcagatgactcacccccttt

SEQ ID NO: 6657 - DNA, 25 bp, synthetic construct
  source 1..25: mol_type = other DNA; mol_type = other DNA
cacaggcagataactcacccccttt

SEQ ID NO: 6658 - DNA, 25 bp, synthetic construct
  source 1..25: mol_type = other DNA; mol_type = other DNA
cacaggcaaataactcacccccttt

SEQ ID NO: 6659 - DNA, 25 bp, synthetic construct
  source 1..25: mol_type = other DNA; mol_type = other DNA
acacaggcagataactcaccccctt

SEQ ID NO: 6660 - DNA, 25 bp, synthetic construct
  source 1..25: mol_type = other DNA; mol_type = other DNA
acacaggcaaataactcaccccctt

SEQ ID NO: 6661 - DNA, 25 bp, synthetic construct
  source 1..25: mol_type = other DNA; mol_type = other DNA
gacacaggcagatgactcaccccct

SEQ ID NO: 6662 - DNA, 25 bp, synthetic construct
  source 1..25: mol_type = other DNA; mol_type = other DNA
gacacaggcagataactcaccccct

SEQ ID NO: 6663 - DNA, 25 bp, synthetic construct
  source 1..25: mol_type = other DNA; mol_type = other DNA
gacacaggcaaataactcaccccct

SEQ ID NO: 6664 - DNA, 25 bp, synthetic construct
  source 1..25: mol_type = other DNA; mol_type = other DNA
ggacacaggcagatgactcaccccc

SEQ ID NO: 6665 - DNA, 25 bp, synthetic construct
  source 1..25: mol_type = other DNA; mol_type = other DNA
ggacacaggcagataactcaccccc

SEQ ID NO: 6666 - DNA, 25 bp, synthetic construct
  source 1..25: mol_type = other DNA; mol_type = other DNA
ggacacaggcaaataactcaccccc

SEQ ID NO: 6667 - DNA, 25 bp, synthetic construct
  source 1..25: mol_type = other DNA; mol_type = other DNA
gggacacaggcagataactcacccc

SEQ ID NO: 6668 - DNA, 25 bp, synthetic construct
  source 1..25: mol_type = other DNA; mol_type = other DNA
gggacacaggcaaataactcacccc

SEQ ID NO: 6669 - DNA, 25 bp, synthetic construct
  source 1..25: mol_type = other DNA; mol_type = other DNA
tgggacacaggcagatgactcaccc

SEQ ID NO: 6670 - DNA, 25 bp, synthetic construct
  source 1..25: mol_type = other DNA; mol_type = other DNA
gtggacacaggcagatgactcaccc

SEQ ID NO: 6671 - DNA, 25 bp, synthetic construct
  source 1..25: mol_type = other DNA; mol_type = other DNA
ggtgacacaggcagatgactcaccc

SEQ ID NO: 6672 - DNA, 25 bp, synthetic construct
  source 1..25: mol_type = other DNA; mol_type = other DNA
gggtacacaggcagatgactcaccc

SEQ ID NO: 6673 - DNA, 25 bp, synthetic construct
  source 1..25: mol_type = other DNA; mol_type = other DNA
ttgggacacaggcagatgactcacc

SEQ ID NO: 6674 - DNA, 25 bp, synthetic construct
  source 1..25: mol_type = other DNA; mol_type = other DNA
tgtggacacaggcagatgactcacc

SEQ ID NO: 6675 - DNA, 25 bp, synthetic construct
  source 1..25: mol_type = other DNA; mol_type = other DNA
tggtgacacaggcagatgactcacc

SEQ ID NO: 6676 - DNA, 25 bp, synthetic construct
  source 1..25: mol_type = other DNA; mol_type = other DNA
tgggtacacaggcagatgactcacc

SEQ ID NO: 6677 - DNA, 25 bp, synthetic construct
  source 1..25: mol_type = other DNA; mol_type = other DNA
cttgggacacaggcagatgactcac

SEQ ID NO: 6678 - DNA, 25 bp, synthetic construct
  source 1..25: mol_type = other DNA; mol_type = other DNA
ctgtggacacaggcagatgactcac

SEQ ID NO: 6679 - DNA, 25 bp, synthetic construct
  source 1..25: mol_type = other DNA; mol_type = other DNA
ctggtgacacaggcagatgactcac

SEQ ID NO: 6680 - DNA, 25 bp, synthetic construct
  source 1..25: mol_type = other DNA; mol_type = other DNA
ctgggtacacaggcagatgactcac

SEQ ID NO: 6681 - DNA, 25 bp, synthetic construct
  source 1..25: mol_type = other DNA; mol_type = other DNA
ccttgggacacaggcagatgactca

SEQ ID NO: 6682 - DNA, 25 bp, synthetic construct
  source 1..25: mol_type = other DNA; mol_type = other DNA
cctggtgacacaggcagatgactca

SEQ ID NO: 6683 - DNA, 25 bp, synthetic construct
  source 1..25: mol_type = other DNA; mol_type = other DNA
cctgggtacacaggcagatgactca

SEQ ID NO: 6684 - DNA, 25 bp, synthetic construct
  source 1..25: mol_type = other DNA; mol_type = other DNA
cccttgggacacaggcagatgactc

SEQ ID NO: 6685 - DNA, 25 bp, synthetic construct
  source 1..25: mol_type = other DNA; mol_type = other DNA
ccctgtggacacaggcagatgactc

SEQ ID NO: 6686 - DNA, 25 bp, synthetic construct
  source 1..25: mol_type = other DNA; mol_type = other DNA
ccctggtgacacaggcagatgactc

SEQ ID NO: 6687 - DNA, 25 bp, synthetic construct
  source 1..25: mol_type = other DNA; mol_type = other DNA
ccctgggtacacaggcagatgactc

SEQ ID NO: 6688 - DNA, 25 bp, synthetic construct
  source 1..25: mol_type = other DNA; mol_type = other DNA
gcccttgggacacaggcagatgact

SEQ ID NO: 6689 - DNA, 25 bp, synthetic construct
  source 1..25: mol_type = other DNA; mol_type = other DNA
gccctgtggacacaggcagatgact

SEQ ID NO: 6690 - DNA, 25 bp, synthetic construct
  source 1..25: mol_type = other DNA; mol_type = other DNA
gccctggtgacacaggcagatgact

SEQ ID NO: 6691 - DNA, 25 bp, synthetic construct
  source 1..25: mol_type = other DNA; mol_type = other DNA
gccctgggtacacaggcagatgact

SEQ ID NO: 6692 - DNA, 25 bp, synthetic construct
  source 1..25: mol_type = other DNA; mol_type = other DNA
ggcccttgggacacaggcagatgac

SEQ ID NO: 6693 - DNA, 25 bp, synthetic construct
  source 1..25: mol_type = other DNA; mol_type = other DNA
ggccctgtggacacaggcagatgac

SEQ ID NO: 6694 - DNA, 25 bp, synthetic construct
  source 1..25: mol_type = other DNA; mol_type = other DNA
ggccctggtgacacaggcagatgac

SEQ ID NO: 6695 - DNA, 25 bp, synthetic construct
  source 1..25: mol_type = other DNA; mol_type = other DNA
ggccctgggtacacaggcagatgac

SEQ ID NO: 6696 - DNA, 25 bp, synthetic construct
  source 1..25: mol_type = other DNA; mol_type = other DNA
aggcccttgggacacaggcagatga

SEQ ID NO: 6697 - DNA, 25 bp, synthetic construct
  source 1..25: mol_type = other DNA; mol_type = other DNA
aggccctgtggacacaggcagatga

SEQ ID NO: 6698 - DNA, 25 bp, synthetic construct
  source 1..25: mol_type = other DNA; mol_type = other DNA
aggccctggtgacacaggcagatga

SEQ ID NO: 6699 - DNA, 25 bp, synthetic construct
  source 1..25: mol_type = other DNA; mol_type = other DNA
aggccctgggtacacaggcagatga

SEQ ID NO: 6700 - DNA, 25 bp, synthetic construct
  source 1..25: mol_type = other DNA; mol_type = other DNA
aaggcccttgggacacaggcagatg

SEQ ID NO: 6701 - DNA, 25 bp, synthetic construct
  source 1..25: mol_type = other DNA; mol_type = other DNA
aaggccctggtgacacaggcagatg

SEQ ID NO: 6702 - DNA, 25 bp, synthetic construct
  source 1..25: mol_type = other DNA; mol_type = other DNA
aaggccctgggtacacaggcagatg

SEQ ID NO: 6703 - DNA, 25 bp, synthetic construct
  source 1..25: mol_type = other DNA; mol_type = other DNA
caaggcccttgggacacaggcagat

SEQ ID NO: 6704 - DNA, 25 bp, synthetic construct
  source 1..25: mol_type = other DNA; mol_type = other DNA
caaggccctgtggacacaggcagat

SEQ ID NO: 6705 - DNA, 25 bp, synthetic construct
  source 1..25: mol_type = other DNA; mol_type = other DNA
caaggccctggtgacacaggcagat

SEQ ID NO: 6706 - DNA, 25 bp, synthetic construct
  source 1..25: mol_type = other DNA; mol_type = other DNA
caaggccctgggtacacaggcagat

SEQ ID NO: 6707 - DNA, 25 bp, synthetic construct
  source 1..25: mol_type = other DNA; mol_type = other DNA
ccaaggcccttgggacacaggcaga

SEQ ID NO: 6708 - DNA, 25 bp, synthetic construct
  source 1..25: mol_type = other DNA; mol_type = other DNA
ccaaggccctgtggacacaggcaga

SEQ ID NO: 6709 - DNA, 25 bp, synthetic construct
  source 1..25: mol_type = other DNA; mol_type = other DNA
ccaaggccctggtgacacaggcaga

SEQ ID NO: 6710 - DNA, 25 bp, synthetic construct
  source 1..25: mol_type = other DNA; mol_type = other DNA
ccaaggccctgggtacacaggcaga

SEQ ID NO: 6711 - DNA, 25 bp, synthetic construct
  source 1..25: mol_type = other DNA; mol_type = other DNA
gccaaggcccttgggacacaggcag

SEQ ID NO: 6712 - DNA, 25 bp, synthetic construct
  source 1..25: mol_type = other DNA; mol_type = other DNA
gccaaggccctgtggacacaggcag

SEQ ID NO: 6713 - DNA, 25 bp, synthetic construct
  source 1..25: mol_type = other DNA; mol_type = other DNA
gccaaggccctggtgacacaggcag

SEQ ID NO: 6714 - DNA, 25 bp, synthetic construct
  source 1..25: mol_type = other DNA; mol_type = other DNA
gccaaggccctgggtacacaggcag

SEQ ID NO: 6715 - DNA, 25 bp, synthetic construct
  source 1..25: mol_type = other DNA; mol_type = other DNA
agccaaggcccttgggacacaggca

SEQ ID NO: 6716 - DNA, 25 bp, synthetic construct
  source 1..25: mol_type = other DNA; mol_type = other DNA
agccaaggccctgtggacacaggca

SEQ ID NO: 6717 - DNA, 25 bp, synthetic construct
  source 1..25: mol_type = other DNA; mol_type = other DNA
agccaaggccctggtgacacaggca

SEQ ID NO: 6718 - DNA, 25 bp, synthetic construct
  source 1..25: mol_type = other DNA; mol_type = other DNA
agccaaggccctgggtacacaggca

SEQ ID NO: 6719 - DNA, 25 bp, synthetic construct
  source 1..25: mol_type = other DNA; mol_type = other DNA
aagccaaggcccttgggacacaggc

SEQ ID NO: 6720 - DNA, 25 bp, synthetic construct
  source 1..25: mol_type = other DNA; mol_type = other DNA
aagccaaggccctggtgacacaggc

SEQ ID NO: 6721 - DNA, 25 bp, synthetic construct
  source 1..25: mol_type = other DNA; mol_type = other DNA
aagccaaggccctgggtacacaggc

SEQ ID NO: 6722 - DNA, 25 bp, synthetic construct
  source 1..25: mol_type = other DNA; mol_type = other DNA
aaagccaaggcccttgggacacagg

SEQ ID NO: 6723 - DNA, 25 bp, synthetic construct
  source 1..25: mol_type = other DNA; mol_type = other DNA
aaagccaaggccctgtggacacagg

SEQ ID NO: 6724 - DNA, 25 bp, synthetic construct
  source 1..25: mol_type = other DNA; mol_type = other DNA
aaagccaaggccctggtgacacagg

SEQ ID NO: 6725 - DNA, 25 bp, synthetic construct
  source 1..25: mol_type = other DNA; mol_type = other DNA
aaagccaaggccctgggtacacagg

SEQ ID NO: 6726 - DNA, 25 bp, synthetic construct
  source 1..25: mol_type = other DNA; mol_type = other DNA
caaagccaaggccctgggaacacaa

SEQ ID NO: 6727 - DNA, 25 bp, synthetic construct
  source 1..25: mol_type = other DNA; mol_type = other DNA
caaagccaaggcccttgggacacag

SEQ ID NO: 6728 - DNA, 25 bp, synthetic construct
  source 1..25: mol_type = other DNA; mol_type = other DNA
caaagccaaggccctgtggacacag

SEQ ID NO: 6729 - DNA, 25 bp, synthetic construct
  source 1..25: mol_type = other DNA; mol_type = other DNA
caaagccaaggccctggtgacacag

SEQ ID NO: 6730 - DNA, 25 bp, synthetic construct
  source 1..25: mol_type = other DNA; mol_type = other DNA
caaagccaaggccctgggtacacag

SEQ ID NO: 6731 - DNA, 25 bp, synthetic construct
  source 1..25: mol_type = other DNA; mol_type = other DNA
gcaaagccaaggccctgggaacaca

SEQ ID NO: 6732 - DNA, 25 bp, synthetic construct
  source 1..25: mol_type = other DNA; mol_type = other DNA
gcaaagccaaggccctggaaacaca

SEQ ID NO: 6733 - DNA, 25 bp, synthetic construct
  source 1..25: mol_type = other DNA; mol_type = other DNA
ggcaaagccaaggccctgggaacac

SEQ ID NO: 6734 - DNA, 25 bp, synthetic construct
  source 1..25: mol_type = other DNA; mol_type = other DNA
ggcaaagccaaggccctggaaacac

SEQ ID NO: 6735 - DNA, 25 bp, synthetic construct
  source 1..25: mol_type = other DNA; mol_type = other DNA
aggcaaagccaaggccctgggaaca

SEQ ID NO: 6736 - DNA, 25 bp, synthetic construct
  source 1..25: mol_type = other DNA; mol_type = other DNA
aggcaaagccaaggccctggaaaca

SEQ ID NO: 6737 - DNA, 25 bp, synthetic construct
  source 1..25: mol_type = other DNA; mol_type = other DNA
caggcaaagccaaggccctgggaac

SEQ ID NO: 6738 - DNA, 25 bp, synthetic construct
  source 1..25: mol_type = other DNA; mol_type = other DNA
caggcaaagccaaggccctggaaac

SEQ ID NO: 6739 - DNA, 25 bp, synthetic construct
  source 1..25: mol_type = other DNA; mol_type = other DNA
tcaggcaaagccaaggccctgggaa

SEQ ID NO: 6740 - DNA, 25 bp, synthetic construct
  source 1..25: mol_type = other DNA; mol_type = other DNA
tcaggcaaagccaaggccctggaaa

SEQ ID NO: 6741 - DNA, 25 bp, synthetic construct
  source 1..25: mol_type = other DNA; mol_type = other DNA
gtcaggcaaagccaaggccctggga

SEQ ID NO: 6742 - DNA, 25 bp, synthetic construct
  source 1..25: mol_type = other DNA; mol_type = other DNA
gtcaggcaaagccaaggccctggaa

SEQ ID NO: 6743 - DNA, 25 bp, synthetic construct
  source 1..25: mol_type = other DNA; mol_type = other DNA
ggtcaggcaaagccaaggccctggg

SEQ ID NO: 6744 - DNA, 25 bp, synthetic construct
  source 1..25: mol_type = other DNA; mol_type = other DNA
ggtcaggcaaagccaaggccctgga

SEQ ID NO: 6745 - DNA, 25 bp, synthetic construct
  source 1..25: mol_type = other DNA; mol_type = other DNA
ggtcaggcaaagccaaggccctgaa

SEQ ID NO: 6746 - DNA, 25 bp, synthetic construct
  source 1..25: mol_type = other DNA; mol_type = other DNA
gggtcaggcaaagccaaggccctga

SEQ ID NO: 6747 - DNA, 25 bp, synthetic construct
  source 1..25: mol_type = other DNA; mol_type = other DNA
gggtcaggcaaagccaaggccctaa

SEQ ID NO: 6748 - DNA, 25 bp, synthetic construct
  source 1..25: mol_type = other DNA; mol_type = other DNA
tgggtcaggcaaagccaaggccctg

SEQ ID NO: 6749 - DNA, 25 bp, synthetic construct
  source 1..25: mol_type = other DNA; mol_type = other DNA
gtggtcaggcaaagccaaggccctg

SEQ ID NO: 6750 - DNA, 25 bp, synthetic construct
  source 1..25: mol_type = other DNA; mol_type = other DNA
ggtgtcaggcaaagccaaggccctg

SEQ ID NO: 6751 - DNA, 25 bp, synthetic construct
  source 1..25: mol_type = other DNA; mol_type = other DNA
gggttcaggcaaagccaaggccctg

SEQ ID NO: 6752 - DNA, 25 bp, synthetic construct
  source 1..25: mol_type = other DNA; mol_type = other DNA
atgggtcaggcaaagccaaggccct

SEQ ID NO: 6753 - DNA, 25 bp, synthetic construct
  source 1..25: mol_type = other DNA; mol_type = other DNA
agtggtcaggcaaagccaaggccct

SEQ ID NO: 6754 - DNA, 25 bp, synthetic construct
  source 1..25: mol_type = other DNA; mol_type = other DNA
aggtgtcaggcaaagccaaggccct

SEQ ID NO: 6755 - DNA, 25 bp, synthetic construct
  source 1..25: mol_type = other DNA; mol_type = other DNA
agggttcaggcaaagccaaggccct

SEQ ID NO: 6756 - DNA, 25 bp, synthetic construct
  source 1..25: mol_type = other DNA; mol_type = other DNA
catgggtcaggcaaagccaaggccc

SEQ ID NO: 6757 - DNA, 25 bp, synthetic construct
  source 1..25: mol_type = other DNA; mol_type = other DNA
cagtggtcaggcaaagccaaggccc

SEQ ID NO: 6758 - DNA, 25 bp, synthetic construct
  source 1..25: mol_type = other DNA; mol_type = other DNA
caggtgtcaggcaaagccaaggccc

SEQ ID NO: 6759 - DNA, 25 bp, synthetic construct
  source 1..25: mol_type = other DNA; mol_type = other DNA
cagggttcaggcaaagccaaggccc

SEQ ID NO: 6760 - DNA, 25 bp, synthetic construct
  source 1..25: mol_type = other DNA; mol_type = other DNA
acatgggtcaggcaaagccaaggcc

SEQ ID NO: 6761 - DNA, 25 bp, synthetic construct
  source 1..25: mol_type = other DNA; mol_type = other DNA
acagtggtcaggcaaagccaaggcc

SEQ ID NO: 6762 - DNA, 25 bp, synthetic construct
  source 1..25: mol_type = other DNA; mol_type = other DNA
acaggtgtcaggcaaagccaaggcc

SEQ ID NO: 6763 - DNA, 25 bp, synthetic construct
  source 1..25: mol_type = other DNA; mol_type = other DNA
acagggttcaggcaaagccaaggcc

SEQ ID NO: 6764 - DNA, 25 bp, synthetic construct
  source 1..25: mol_type = other DNA; mol_type = other DNA
gacatgggtcaggcaaagccaaggc

SEQ ID NO: 6765 - DNA, 25 bp, synthetic construct
  source 1..25: mol_type = other DNA; mol_type = other DNA
gacaggtgtcaggcaaagccaaggc

SEQ ID NO: 6766 - DNA, 25 bp, synthetic construct
  source 1..25: mol_type = other DNA; mol_type = other DNA
gacagggttcaggcaaagccaaggc

SEQ ID NO: 6767 - DNA, 25 bp, synthetic construct
  source 1..25: mol_type = other DNA; mol_type = other DNA
agacatgggtcaggcaaagccaagg

SEQ ID NO: 6768 - DNA, 25 bp, synthetic construct
  source 1..25: mol_type = other DNA; mol_type = other DNA
agacagtggtcaggcaaagccaagg

SEQ ID NO: 6769 - DNA, 25 bp, synthetic construct
  source 1..25: mol_type = other DNA; mol_type = other DNA
agacaggtgtcaggcaaagccaagg

SEQ ID NO: 6770 - DNA, 25 bp, synthetic construct
  source 1..25: mol_type = other DNA; mol_type = other DNA
agacagggttcaggcaaagccaagg

SEQ ID NO: 6771 - DNA, 25 bp, synthetic construct
  source 1..25: mol_type = other DNA; mol_type = other DNA
cagacatgggtcaggcaaagccaag

SEQ ID NO: 6772 - DNA, 25 bp, synthetic construct
  source 1..25: mol_type = other DNA; mol_type = other DNA
cagacagtggtcaggcaaagccaag

SEQ ID NO: 6773 - DNA, 25 bp, synthetic construct
  source 1..25: mol_type = other DNA; mol_type = other DNA
cagacaggtgtcaggcaaagccaag

SEQ ID NO: 6774 - DNA, 25 bp, synthetic construct
  source 1..25: mol_type = other DNA; mol_type = other DNA
cagacagggttcaggcaaagccaag

SEQ ID NO: 6775 - DNA, 25 bp, synthetic construct
  source 1..25: mol_type = other DNA; mol_type = other DNA
ccagacatgggtcaggcaaagccaa

SEQ ID NO: 6776 - DNA, 25 bp, synthetic construct
  source 1..25: mol_type = other DNA; mol_type = other DNA
ccagacagtggtcaggcaaagccaa

SEQ ID NO: 6777 - DNA, 25 bp, synthetic construct
  source 1..25: mol_type = other DNA; mol_type = other DNA
ccagacaggtgtcaggcaaagccaa

SEQ ID NO: 6778 - DNA, 25 bp, synthetic construct
  source 1..25: mol_type = other DNA; mol_type = other DNA
ccagacagggttcaggcaaagccaa

SEQ ID NO: 6779 - DNA, 25 bp, synthetic construct
  source 1..25: mol_type = other DNA; mol_type = other DNA
cccagacatgggtcaggcaaagcca

SEQ ID NO: 6780 - DNA, 25 bp, synthetic construct
  source 1..25: mol_type = other DNA; mol_type = other DNA
cccagacagtggtcaggcaaagcca

SEQ ID NO: 6781 - DNA, 25 bp, synthetic construct
  source 1..25: mol_type = other DNA; mol_type = other DNA
cccagacaggtgtcaggcaaagcca

SEQ ID NO: 6782 - DNA, 25 bp, synthetic construct
  source 1..25: mol_type = other DNA; mol_type = other DNA
cccagacagggttcaggcaaagcca

SEQ ID NO: 6783 - DNA, 25 bp, synthetic construct
  source 1..25: mol_type = other DNA; mol_type = other DNA
ccccagacatgggtcaggcaaagcc

SEQ ID NO: 6784 - DNA, 25 bp, synthetic construct
  source 1..25: mol_type = other DNA; mol_type = other DNA
ccccagacagtggtcaggcaaagcc

SEQ ID NO: 6785 - DNA, 25 bp, synthetic construct
  source 1..25: mol_type = other DNA; mol_type = other DNA
ccccagacaggtgtcaggcaaagcc

SEQ ID NO: 6786 - DNA, 25 bp, synthetic construct
  source 1..25: mol_type = other DNA; mol_type = other DNA
ccccagacagggttcaggcaaagcc

SEQ ID NO: 6787 - DNA, 25 bp, synthetic construct
  source 1..25: mol_type = other DNA; mol_type = other DNA
cccccagacatgggtcaggcaaagc

SEQ ID NO: 6788 - DNA, 25 bp, synthetic construct
  source 1..25: mol_type = other DNA; mol_type = other DNA
cccccagacagtggtcaggcaaagc

SEQ ID NO: 6789 - DNA, 25 bp, synthetic construct
  source 1..25: mol_type = other DNA; mol_type = other DNA
cccccagacaggtgtcaggcaaagc

SEQ ID NO: 6790 - DNA, 25 bp, synthetic construct
  source 1..25: mol_type = other DNA; mol_type = other DNA
cccccagacagggttcaggcaaagc

SEQ ID NO: 6791 - DNA, 25 bp, synthetic construct
  source 1..25: mol_type = other DNA; mol_type = other DNA
tcccccagacatgggtcaggcaaag

SEQ ID NO: 6792 - DNA, 25 bp, synthetic construct
  source 1..25: mol_type = other DNA; mol_type = other DNA
tcccccagacagtggtcaggcaaag

SEQ ID NO: 6793 - DNA, 25 bp, synthetic construct
  source 1..25: mol_type = other DNA; mol_type = other DNA
tcccccagacaggtgtcaggcaaag

SEQ ID NO: 6794 - DNA, 25 bp, synthetic construct
  source 1..25: mol_type = other DNA; mol_type = other DNA
tcccccagacagggttcaggcaaag

SEQ ID NO: 6795 - DNA, 25 bp, synthetic construct
  source 1..25: mol_type = other DNA; mol_type = other DNA
ctcccccagacatgggtcaggcaaa

SEQ ID NO: 6796 - DNA, 25 bp, synthetic construct
  source 1..25: mol_type = other DNA; mol_type = other DNA
ctcccccagacagtggtcaggcaaa

SEQ ID NO: 6797 - DNA, 25 bp, synthetic construct
  source 1..25: mol_type = other DNA; mol_type = other DNA
ctcccccagacaggtgtcaggcaaa

SEQ ID NO: 6798 - DNA, 25 bp, synthetic construct
  source 1..25: mol_type = other DNA; mol_type = other DNA
ctcccccagacagggttcaggcaaa

SEQ ID NO: 6799 - DNA, 25 bp, synthetic construct
  source 1..25: mol_type = other DNA; mol_type = other DNA
actcccccagacatgggtcaggcaa

SEQ ID NO: 6800 - DNA, 25 bp, synthetic construct
  source 1..25: mol_type = other DNA; mol_type = other DNA
actcccccagacagtggtcaggcaa

SEQ ID NO: 6801 - DNA, 25 bp, synthetic construct
  source 1..25: mol_type = other DNA; mol_type = other DNA
actcccccagacaggtgtcaggcaa

SEQ ID NO: 6802 - DNA, 25 bp, synthetic construct
  source 1..25: mol_type = other DNA; mol_type = other DNA
actcccccagacagggttcaggcaa

SEQ ID NO: 6803 - DNA, 25 bp, synthetic construct
  source 1..25: mol_type = other DNA; mol_type = other DNA
cactcccccagacatgggtcaggca

SEQ ID NO: 6804 - DNA, 25 bp, synthetic construct
  source 1..25: mol_type = other DNA; mol_type = other DNA
cactcccccagacagtggtcaggca

SEQ ID NO: 6805 - DNA, 25 bp, synthetic construct
  source 1..25: mol_type = other DNA; mol_type = other DNA
cactcccccagacaggtgtcaggca

SEQ ID NO: 6806 - DNA, 25 bp, synthetic construct
  source 1..25: mol_type = other DNA; mol_type = other DNA
cactcccccagacagggttcaggca

SEQ ID NO: 6807 - DNA, 25 bp, synthetic construct
  source 1..25: mol_type = other DNA; mol_type = other DNA
gcactcccccagacatgggtcaggc

SEQ ID NO: 6808 - DNA, 25 bp, synthetic construct
  source 1..25: mol_type = other DNA; mol_type = other DNA
gcactcccccagacagtggtcaggc

SEQ ID NO: 6809 - DNA, 25 bp, synthetic construct
  source 1..25: mol_type = other DNA; mol_type = other DNA
gcactcccccagacaggtgtcaggc

SEQ ID NO: 6810 - DNA, 25 bp, synthetic construct
  source 1..25: mol_type = other DNA; mol_type = other DNA
gcactcccccagacagggttcaggc

SEQ ID NO: 6811 - DNA, 25 bp, synthetic construct
  source 1..25: mol_type = other DNA; mol_type = other DNA
agcactcccccagacatgggtcagg

SEQ ID NO: 6812 - DNA, 25 bp, synthetic construct
  source 1..25: mol_type = other DNA; mol_type = other DNA
agcactcccccagacagtggtcagg

SEQ ID NO: 6813 - DNA, 25 bp, synthetic construct
  source 1..25: mol_type = other DNA; mol_type = other DNA
agcactcccccagacaggtgtcagg

SEQ ID NO: 6814 - DNA, 25 bp, synthetic construct
  source 1..25: mol_type = other DNA; mol_type = other DNA
agcactcccccagacagggttcagg

SEQ ID NO: 6815 - DNA, 25 bp, synthetic construct
  source 1..25: mol_type = other DNA; mol_type = other DNA
cagcactcccccagacagggatcaa

SEQ ID NO: 6816 - DNA, 25 bp, synthetic construct
  source 1..25: mol_type = other DNA; mol_type = other DNA
cagcactcccccagacatgggtcag

SEQ ID NO: 6817 - DNA, 25 bp, synthetic construct
  source 1..25: mol_type = other DNA; mol_type = other DNA
cagcactcccccagacagtggtcag

SEQ ID NO: 6818 - DNA, 25 bp, synthetic construct
  source 1..25: mol_type = other DNA; mol_type = other DNA
cagcactcccccagacaggtgtcag

SEQ ID NO: 6819 - DNA, 25 bp, synthetic construct
  source 1..25: mol_type = other DNA; mol_type = other DNA
cagcactcccccagacagggttcag

SEQ ID NO: 6820 - DNA, 25 bp, synthetic construct
  source 1..25: mol_type = other DNA; mol_type = other DNA
ccagcactcccccagacagggatca

SEQ ID NO: 6821 - DNA, 25 bp, synthetic construct
  source 1..25: mol_type = other DNA; mol_type = other DNA
ccagcactcccccagacaggaatca

SEQ ID NO: 6822 - DNA, 25 bp, synthetic construct
  source 1..25: mol_type = other DNA; mol_type = other DNA
accagcactcccccagacagggatc

SEQ ID NO: 6823 - DNA, 25 bp, synthetic construct
  source 1..25: mol_type = other DNA; mol_type = other DNA
accagcactcccccagacaggaatc

SEQ ID NO: 6824 - DNA, 25 bp, synthetic construct
  source 1..25: mol_type = other DNA; mol_type = other DNA
caccagcactcccccagacagggat

SEQ ID NO: 6825 - DNA, 25 bp, synthetic construct
  source 1..25: mol_type = other DNA; mol_type = other DNA
caccagcactcccccagacaggaat

SEQ ID NO: 6826 - DNA, 25 bp, synthetic construct
  source 1..25: mol_type = other DNA; mol_type = other DNA
acaccagcactcccccagacaggga

SEQ ID NO: 6827 - DNA, 25 bp, synthetic construct
  source 1..25: mol_type = other DNA; mol_type = other DNA
acaccagcactcccccagacaggaa

SEQ ID NO: 6828 - DNA, 25 bp, synthetic construct
  source 1..25: mol_type = other DNA; mol_type = other DNA
cacaccagcactcccccagacaggg

SEQ ID NO: 6829 - DNA, 25 bp, synthetic construct
  source 1..25: mol_type = other DNA; mol_type = other DNA
cacaccagcactcccccagacagga

SEQ ID NO: 6830 - DNA, 25 bp, synthetic construct
  source 1..25: mol_type = other DNA; mol_type = other DNA
cacaccagcactcccccagacagaa

SEQ ID NO: 6831 - DNA, 25 bp, synthetic construct
  source 1..25: mol_type = other DNA; mol_type = other DNA
acacaccagcactcccccagacaga

SEQ ID NO: 6832 - DNA, 25 bp, synthetic construct
  source 1..25: mol_type = other DNA; mol_type = other DNA
acacaccagcactcccccagacaaa

SEQ ID NO: 6833 - DNA, 25 bp, synthetic construct
  source 1..25: mol_type = other DNA; mol_type = other DNA
cacacaccagcactcccccagacag

SEQ ID NO: 6834 - DNA, 25 bp, synthetic construct
  source 1..25: mol_type = other DNA; mol_type = other DNA
cacacaccagcactcccccagacaa

SEQ ID NO: 6835 - DNA, 25 bp, synthetic construct
  source 1..25: mol_type = other DNA; mol_type = other DNA
cacacaccagcactcccccaaacaa

SEQ ID NO: 6836 - DNA, 25 bp, synthetic construct
  source 1..25: mol_type = other DNA; mol_type = other DNA
tcacacaccagcactcccccagaca

SEQ ID NO: 6837 - DNA, 25 bp, synthetic construct
  source 1..25: mol_type = other DNA; mol_type = other DNA
tcacacaccagcactcccccaaaca

SEQ ID NO: 6838 - DNA, 25 bp, synthetic construct
  source 1..25: mol_type = other DNA; mol_type = other DNA
tcacacaccaacactcccccaaaca

SEQ ID NO: 6839 - DNA, 25 bp, synthetic construct
  source 1..25: mol_type = other DNA; mol_type = other DNA
ctcacacaccagcactcccccaaac

SEQ ID NO: 6840 - DNA, 25 bp, synthetic construct
  source 1..25: mol_type = other DNA; mol_type = other DNA
ctcacacaccaacactcccccaaac

SEQ ID NO: 6841 - DNA, 25 bp, synthetic construct
  source 1..25: mol_type = other DNA; mol_type = other DNA
cctcacacaccagcactcccccaga

SEQ ID NO: 6842 - DNA, 25 bp, synthetic construct
  source 1..25: mol_type = other DNA; mol_type = other DNA
cctcacacaccagcactcccccaaa

SEQ ID NO: 6843 - DNA, 25 bp, synthetic construct
  source 1..25: mol_type = other DNA; mol_type = other DNA
cctcacacaccaacactcccccaaa

SEQ ID NO: 6844 - DNA, 25 bp, synthetic construct
  source 1..25: mol_type = other DNA; mol_type = other DNA
tcctcacacaccagcactcccccag

SEQ ID NO: 6845 - DNA, 25 bp, synthetic construct
  source 1..25: mol_type = other DNA; mol_type = other DNA
tcctcacacaccagcactcccccaa

SEQ ID NO: 6846 - DNA, 25 bp, synthetic construct
  source 1..25: mol_type = other DNA; mol_type = other DNA
tcctcacacaccaacactcccccaa

SEQ ID NO: 6847 - DNA, 25 bp, synthetic construct
  source 1..25: mol_type = other DNA; mol_type = other DNA
ctcctcacacaccaacactccccca

SEQ ID NO: 6848 - DNA, 25 bp, synthetic construct
  source 1..25: mol_type = other DNA; mol_type = other DNA
cctcctcacacaccagcactccccc

SEQ ID NO: 6849 - DNA, 25 bp, synthetic construct
  source 1..25: mol_type = other DNA; mol_type = other DNA
cctcctcacacaccaacactccccc

SEQ ID NO: 6850 - DNA, 25 bp, synthetic construct
  source 1..25: mol_type = other DNA; mol_type = other DNA
acctcctcacacaccagcactcccc

SEQ ID NO: 6851 - DNA, 25 bp, synthetic construct
  source 1..25: mol_type = other DNA; mol_type = other DNA
acctcctcacacaccaacactcccc

SEQ ID NO: 6852 - DNA, 25 bp, synthetic construct
  source 1..25: mol_type = other DNA; mol_type = other DNA
aacctcctcacacaccaacactccc

SEQ ID NO: 6853 - DNA, 25 bp, synthetic construct
  source 1..25: mol_type = other DNA; mol_type = other DNA
gaacctcctcacacaccagcactcc

SEQ ID NO: 6854 - DNA, 25 bp, synthetic construct
  source 1..25: mol_type = other DNA; mol_type = other DNA
gaacctcctcacacaccaacactcc

SEQ ID NO: 6855 - DNA, 25 bp, synthetic construct
  source 1..25: mol_type = other DNA; mol_type = other DNA
aaacctcctcacacaccaacactcc

SEQ ID NO: 6856 - DNA, 25 bp, synthetic construct
  source 1..25: mol_type = other DNA; mol_type = other DNA
ggaacctcctcacacaccaacactc

SEQ ID NO: 6857 - DNA, 25 bp, synthetic construct
  source 1..25: mol_type = other DNA; mol_type = other DNA
gaaacctcctcacacaccaacactc

SEQ ID NO: 6858 - DNA, 25 bp, synthetic construct
  source 1..25: mol_type = other DNA; mol_type = other DNA
tggaacctcctcacacaccaacact

SEQ ID NO: 6859 - DNA, 25 bp, synthetic construct
  source 1..25: mol_type = other DNA; mol_type = other DNA
tgaaacctcctcacacaccaacact

SEQ ID NO: 6860 - DNA, 25 bp, synthetic construct
  source 1..25: mol_type = other DNA; mol_type = other DNA
ctggaacctcctcacacaccagcac

SEQ ID NO: 6861 - DNA, 25 bp, synthetic construct
  source 1..25: mol_type = other DNA; mol_type = other DNA
ctggaacctcctcacacaccaacac

SEQ ID NO: 6862 - DNA, 25 bp, synthetic construct
  source 1..25: mol_type = other DNA; mol_type = other DNA
ctgaaacctcctcacacaccaacac

SEQ ID NO: 6863 - DNA, 25 bp, synthetic construct
  source 1..25: mol_type = other DNA; mol_type = other DNA
gctggaacctcctcacacaccagca

SEQ ID NO: 6864 - DNA, 25 bp, synthetic construct
  source 1..25: mol_type = other DNA; mol_type = other DNA
gctggaacctcctcacacaccaaca

SEQ ID NO: 6865 - DNA, 25 bp, synthetic construct
  source 1..25: mol_type = other DNA; mol_type = other DNA
gctgaaacctcctcacacaccaaca

SEQ ID NO: 6866 - DNA, 25 bp, synthetic construct
  source 1..25: mol_type = other DNA; mol_type = other DNA
cgctggaacctcctcacacaccaac

SEQ ID NO: 6867 - DNA, 25 bp, synthetic construct
  source 1..25: mol_type = other DNA; mol_type = other DNA
cgctgaaacctcctcacacaccaac

SEQ ID NO: 6868 - DNA, 25 bp, synthetic construct
  source 1..25: mol_type = other DNA; mol_type = other DNA
gcgctggaacctcctcacacaccaa

SEQ ID NO: 6869 - DNA, 25 bp, synthetic construct
  source 1..25: mol_type = other DNA; mol_type = other DNA
gcgctgaaacctcctcacacaccaa

SEQ ID NO: 6870 - DNA, 25 bp, synthetic construct
  source 1..25: mol_type = other DNA; mol_type = other DNA
tgcgctggaacctcctcacacacca

SEQ ID NO: 6871 - DNA, 25 bp, synthetic construct
  source 1..25: mol_type = other DNA; mol_type = other DNA
tgcgctgaaacctcctcacacacca

SEQ ID NO: 6872 - DNA, 25 bp, synthetic construct
  source 1..25: mol_type = other DNA; mol_type = other DNA
tgcgctaaaacctcctcacacacca

SEQ ID NO: 6873 - DNA, 25 bp, synthetic construct
  source 1..25: mol_type = other DNA; mol_type = other DNA
ttgcgctgaaacctcctcacacacc

SEQ ID NO: 6874 - DNA, 25 bp, synthetic construct
  source 1..25: mol_type = other DNA; mol_type = other DNA
ttgcgctaaaacctcctcacacacc

SEQ ID NO: 6875 - DNA, 25 bp, synthetic construct
  source 1..25: mol_type = other DNA; mol_type = other DNA
cttgcgctggaacctcctcacacac

SEQ ID NO: 6876 - DNA, 25 bp, synthetic construct
  source 1..25: mol_type = other DNA; mol_type = other DNA
cttgcgctgaaacctcctcacacac

SEQ ID NO: 6877 - DNA, 25 bp, synthetic construct
  source 1..25: mol_type = other DNA; mol_type = other DNA
cttgcgctaaaacctcctcacacac

SEQ ID NO: 6878 - DNA, 25 bp, synthetic construct
  source 1..25: mol_type = other DNA; mol_type = other DNA
acttgcgctggaacctcctcacaca

SEQ ID NO: 6879 - DNA, 25 bp, synthetic construct
  source 1..25: mol_type = other DNA; mol_type = other DNA
acttgcgctgaaacctcctcacaca

SEQ ID NO: 6880 - DNA, 25 bp, synthetic construct
  source 1..25: mol_type = other DNA; mol_type = other DNA
acttgcgctaaaacctcctcacaca

SEQ ID NO: 6881 - DNA, 25 bp, synthetic construct
  source 1..25: mol_type = other DNA; mol_type = other DNA
gacttgcgctgaaacctcctcacac

SEQ ID NO: 6882 - DNA, 25 bp, synthetic construct
  source 1..25: mol_type = other DNA; mol_type = other DNA
gacttgcgctaaaacctcctcacac

SEQ ID NO: 6883 - DNA, 25 bp, synthetic construct
  source 1..25: mol_type = other DNA; mol_type = other DNA
tgacttgcgctggaacctcctcaca

SEQ ID NO: 6884 - DNA, 25 bp, synthetic construct
  source 1..25: mol_type = other DNA; mol_type = other DNA
tgacttgcgctgaaacctcctcaca

SEQ ID NO: 6885 - DNA, 25 bp, synthetic construct
  source 1..25: mol_type = other DNA; mol_type = other DNA
tgacttgcgctaaaacctcctcaca

SEQ ID NO: 6886 - DNA, 25 bp, synthetic construct
  source 1..25: mol_type = other DNA; mol_type = other DNA
ctgacttgcgctggaacctcctcac

SEQ ID NO: 6887 - DNA, 25 bp, synthetic construct
  source 1..25: mol_type = other DNA; mol_type = other DNA
ctgacttgcgctgaaacctcctcac

SEQ ID NO: 6888 - DNA, 25 bp, synthetic construct
  source 1..25: mol_type = other DNA; mol_type = other DNA
ctgacttgcgctaaaacctcctcac

SEQ ID NO: 6889 - DNA, 25 bp, synthetic construct
  source 1..25: mol_type = other DNA; mol_type = other DNA
cctgacttgcgctgaaacctcctca

SEQ ID NO: 6890 - DNA, 25 bp, synthetic construct
  source 1..25: mol_type = other DNA; mol_type = other DNA
cctgacttgcgctaaaacctcctca

SEQ ID NO: 6891 - DNA, 25 bp, synthetic construct
  source 1..25: mol_type = other DNA; mol_type = other DNA
ccctgacttgcgctggaacctcctc

SEQ ID NO: 6892 - DNA, 25 bp, synthetic construct
  source 1..25: mol_type = other DNA; mol_type = other DNA
ccctgacttgcgctgaaacctcctc

SEQ ID NO: 6893 - DNA, 25 bp, synthetic construct
  source 1..25: mol_type = other DNA; mol_type = other DNA
ccctgacttgcgctaaaacctcctc

SEQ ID NO: 6894 - DNA, 25 bp, synthetic construct
  source 1..25: mol_type = other DNA; mol_type = other DNA
accctgacttgcgctgaaacctcct

SEQ ID NO: 6895 - DNA, 25 bp, synthetic construct
  source 1..25: mol_type = other DNA; mol_type = other DNA
accctgacttgcgctaaaacctcct

SEQ ID NO: 6896 - DNA, 25 bp, synthetic construct
  source 1..25: mol_type = other DNA; mol_type = other DNA
caccctgacttgcgctgaaacctcc

SEQ ID NO: 6897 - DNA, 25 bp, synthetic construct
  source 1..25: mol_type = other DNA; mol_type = other DNA
caccctgacttgcgctaaaacctcc

SEQ ID NO: 6898 - DNA, 25 bp, synthetic construct
  source 1..25: mol_type = other DNA; mol_type = other DNA
ccaccctgacttgcgctggaacctc

SEQ ID NO: 6899 - DNA, 25 bp, synthetic construct
  source 1..25: mol_type = other DNA; mol_type = other DNA
ccaccctgacttgcgctgaaacctc

SEQ ID NO: 6900 - DNA, 25 bp, synthetic construct
  source 1..25: mol_type = other DNA; mol_type = other DNA
ccaccctgacttgcgctaaaacctc

SEQ ID NO: 6901 - DNA, 25 bp, synthetic construct
  source 1..25: mol_type = other DNA; mol_type = other DNA
gccaccctgacttgcgctggaacct

SEQ ID NO: 6902 - DNA, 25 bp, synthetic construct
  source 1..25: mol_type = other DNA; mol_type = other DNA
gccaccctgacttgcgctgaaacct

SEQ ID NO: 6903 - DNA, 25 bp, synthetic construct
  source 1..25: mol_type = other DNA; mol_type = other DNA
gccaccctgacttgcgctaaaacct

SEQ ID NO: 6904 - DNA, 25 bp, synthetic construct
  source 1..25: mol_type = other DNA; mol_type = other DNA
ggccaccctgacttgcgctgaaacc

SEQ ID NO: 6905 - DNA, 25 bp, synthetic construct
  source 1..25: mol_type = other DNA; mol_type = other DNA
ggccaccctgacttgcgctaaaacc

SEQ ID NO: 6906 - DNA, 25 bp, synthetic construct
  source 1..25: mol_type = other DNA; mol_type = other DNA
cgctaatctcggcgggtgtgatcct

SEQ ID NO: 6907 - DNA, 25 bp, synthetic construct
  source 1..25: mol_type = other DNA; mol_type = other DNA
cgctaatctcggcgggtgtaatcct

SEQ ID NO: 6908 - DNA, 25 bp, synthetic construct
  source 1..25: mol_type = other DNA; mol_type = other DNA
cgctaatctcggcgggtataatcct

SEQ ID NO: 6909 - DNA, 25 bp, synthetic construct
  source 1..25: mol_type = other DNA; mol_type = other DNA
acgctaatctcggcgggtgtgatcc

SEQ ID NO: 6910 - DNA, 25 bp, synthetic construct
  source 1..25: mol_type = other DNA; mol_type = other DNA
acgctaatctcggcgggtgtaatcc

SEQ ID NO: 6911 - DNA, 25 bp, synthetic construct
  source 1..25: mol_type = other DNA; mol_type = other DNA
acgctaatctcggcgggtataatcc

SEQ ID NO: 6912 - DNA, 25 bp, synthetic construct
  source 1..25: mol_type = other DNA; mol_type = other DNA
tacgctaatctcggcgggtgtaatc

SEQ ID NO: 6913 - DNA, 25 bp, synthetic construct
  source 1..25: mol_type = other DNA; mol_type = other DNA
tacgctaatctcggcgggtataatc

SEQ ID NO: 6914 - DNA, 25 bp, synthetic construct
  source 1..25: mol_type = other DNA; mol_type = other DNA
ttacgctaatctcggcgggtgtgat

SEQ ID NO: 6915 - DNA, 25 bp, synthetic construct
  source 1..25: mol_type = other DNA; mol_type = other DNA
ttacgctaatctcggcgggtgtaat

SEQ ID NO: 6916 - DNA, 25 bp, synthetic construct
  source 1..25: mol_type = other DNA; mol_type = other DNA
ttacgctaatctcggcgggtataat

SEQ ID NO: 6917 - DNA, 25 bp, synthetic construct
  source 1..25: mol_type = other DNA; mol_type = other DNA
cttacgctaatctcggcgggtgtga

SEQ ID NO: 6918 - DNA, 25 bp, synthetic construct
  source 1..25: mol_type = other DNA; mol_type = other DNA
cttacgctaatctcggcgggtgtaa

SEQ ID NO: 6919 - DNA, 25 bp, synthetic construct
  source 1..25: mol_type = other DNA; mol_type = other DNA
cttacgctaatctcggcgggtataa

SEQ ID NO: 6920 - DNA, 25 bp, synthetic construct
  source 1..25: mol_type = other DNA; mol_type = other DNA
ccttacgctaatctcggcgggtgta

SEQ ID NO: 6921 - DNA, 25 bp, synthetic construct
  source 1..25: mol_type = other DNA; mol_type = other DNA
ccttacgctaatctcggcgggtata

SEQ ID NO: 6922 - DNA, 25 bp, synthetic construct
  source 1..25: mol_type = other DNA; mol_type = other DNA
cccttacgctaatctcggcgggtgt

SEQ ID NO: 6923 - DNA, 25 bp, synthetic construct
  source 1..25: mol_type = other DNA; mol_type = other DNA
cccttacgctaatctcggcgggtat

SEQ ID NO: 6924 - DNA, 25 bp, synthetic construct
  source 1..25: mol_type = other DNA; mol_type = other DNA
cccttacgctaatctcggcggatat

SEQ ID NO: 6925 - DNA, 25 bp, synthetic construct
  source 1..25: mol_type = other DNA; mol_type = other DNA
gcccttacgctaatctcggcgggtg

SEQ ID NO: 6926 - DNA, 25 bp, synthetic construct
  source 1..25: mol_type = other DNA; mol_type = other DNA
gcccttacgctaatctcggcgggta

SEQ ID NO: 6927 - DNA, 25 bp, synthetic construct
  source 1..25: mol_type = other DNA; mol_type = other DNA
gcccttacgctaatctcggcggata

SEQ ID NO: 6928 - DNA, 25 bp, synthetic construct
  source 1..25: mol_type = other DNA; mol_type = other DNA
ggcccttacgctaatctcggcggat

SEQ ID NO: 6929 - DNA, 25 bp, synthetic construct
  source 1..25: mol_type = other DNA; mol_type = other DNA
ggcccttacgctaatctcggcgaat

SEQ ID NO: 6930 - DNA, 25 bp, synthetic construct
  source 1..25: mol_type = other DNA; mol_type = other DNA
tggcccttacgctaatctcggcggg

SEQ ID NO: 6931 - DNA, 25 bp, synthetic construct
  source 1..25: mol_type = other DNA; mol_type = other DNA
tggcccttacgctaatctcggcgga

SEQ ID NO: 6932 - DNA, 25 bp, synthetic construct
  source 1..25: mol_type = other DNA; mol_type = other DNA
tggcccttacgctaatctcggcgaa

SEQ ID NO: 6933 - DNA, 25 bp, synthetic construct
  source 1..25: mol_type = other DNA; mol_type = other DNA
gtggcccttacgctaatctcggcgg

SEQ ID NO: 6934 - DNA, 25 bp, synthetic construct
  source 1..25: mol_type = other DNA; mol_type = other DNA
gtggcccttacgctaatctcggcga

SEQ ID NO: 6935 - DNA, 25 bp, synthetic construct
  source 1..25: mol_type = other DNA; mol_type = other DNA
gtggcccttacgctaatctcggcaa

SEQ ID NO: 6936 - DNA, 25 bp, synthetic construct
  source 1..25: mol_type = other DNA; mol_type = other DNA
cgtggcccttacgctaatctcggca

SEQ ID NO: 6937 - DNA, 25 bp, synthetic construct
  source 1..25: mol_type = other DNA; mol_type = other DNA
cgtggcccttacgctaatctcgaca

SEQ ID NO: 6938 - DNA, 25 bp, synthetic construct
  source 1..25: mol_type = other DNA; mol_type = other DNA
ccgtggcccttacgctaatctcggc

SEQ ID NO: 6939 - DNA, 25 bp, synthetic construct
  source 1..25: mol_type = other DNA; mol_type = other DNA
ccgtggcccttacgctaatctcgac

SEQ ID NO: 6940 - DNA, 25 bp, synthetic construct
  source 1..25: mol_type = other DNA; mol_type = other DNA
ccgtggcccttacgctaatctcaac

SEQ ID NO: 6941 - DNA, 25 bp, synthetic construct
  source 1..25: mol_type = other DNA; mol_type = other DNA
cccgtggcccttacgctaatctcgg

SEQ ID NO: 6942 - DNA, 25 bp, synthetic construct
  source 1..25: mol_type = other DNA; mol_type = other DNA
cccgtggcccttacgctaatctcga

SEQ ID NO: 6943 - DNA, 25 bp, synthetic construct
  source 1..25: mol_type = other DNA; mol_type = other DNA
cccgtggcccttacgctaatctcaa

SEQ ID NO: 6944 - DNA, 25 bp, synthetic construct
  source 1..25: mol_type = other DNA; mol_type = other DNA
gcccgtggcccttacgctaatctca

SEQ ID NO: 6945 - DNA, 25 bp, synthetic construct
  source 1..25: mol_type = other DNA; mol_type = other DNA
gcccgtggcccttacactaatctca

SEQ ID NO: 6946 - DNA, 25 bp, synthetic construct
  source 1..25: mol_type = other DNA; mol_type = other DNA
cgcccgtggcccttacgctaatctc

SEQ ID NO: 6947 - DNA, 25 bp, synthetic construct
  source 1..25: mol_type = other DNA; mol_type = other DNA
cgcccgtggcccttacactaatctc

SEQ ID NO: 6948 - DNA, 25 bp, synthetic construct
  source 1..25: mol_type = other DNA; mol_type = other DNA
cgcccgtgacccttacactaatctc

SEQ ID NO: 6949 - DNA, 25 bp, synthetic construct
  source 1..25: mol_type = other DNA; mol_type = other DNA
ccgcccgtggcccttacgctaatct

SEQ ID NO: 6950 - DNA, 25 bp, synthetic construct
  source 1..25: mol_type = other DNA; mol_type = other DNA
ccgcccgtggcccttacactaatct

SEQ ID NO: 6951 - DNA, 25 bp, synthetic construct
  source 1..25: mol_type = other DNA; mol_type = other DNA
ccgcccgtgacccttacactaatct

SEQ ID NO: 6952 - DNA, 25 bp, synthetic construct
  source 1..25: mol_type = other DNA; mol_type = other DNA
gccgcccgtggcccttacactaatc

SEQ ID NO: 6953 - DNA, 25 bp, synthetic construct
  source 1..25: mol_type = other DNA; mol_type = other DNA
gccgcccgtgacccttacactaatc

SEQ ID NO: 6954 - DNA, 25 bp, synthetic construct
  source 1..25: mol_type = other DNA; mol_type = other DNA
agccgcccgtggcccttacgctaat

SEQ ID NO: 6955 - DNA, 25 bp, synthetic construct
  source 1..25: mol_type = other DNA; mol_type = other DNA
agccgcccgtggcccttacactaat

SEQ ID NO: 6956 - DNA, 25 bp, synthetic construct
  source 1..25: mol_type = other DNA; mol_type = other DNA
agccgcccgtgacccttacactaat

SEQ ID NO: 6957 - DNA, 25 bp, synthetic construct
  source 1..25: mol_type = other DNA; mol_type = other DNA
cagccgcccgtggcccttacgctaa

SEQ ID NO: 6958 - DNA, 25 bp, synthetic construct
  source 1..25: mol_type = other DNA; mol_type = other DNA
cagccgcccgtggcccttacactaa

SEQ ID NO: 6959 - DNA, 25 bp, synthetic construct
  source 1..25: mol_type = other DNA; mol_type = other DNA
cagccgcccgtgacccttacactaa

SEQ ID NO: 6960 - DNA, 25 bp, synthetic construct
  source 1..25: mol_type = other DNA; mol_type = other DNA
ccagccgcccgtggcccttacacta

SEQ ID NO: 6961 - DNA, 25 bp, synthetic construct
  source 1..25: mol_type = other DNA; mol_type = other DNA
ccagccgcccgtgacccttacacta

SEQ ID NO: 6962 - DNA, 25 bp, synthetic construct
  source 1..25: mol_type = other DNA; mol_type = other DNA
cccagccgcccgtggcccttacgct

SEQ ID NO: 6963 - DNA, 25 bp, synthetic construct
  source 1..25: mol_type = other DNA; mol_type = other DNA
cccagccgcccgtggcccttacact

SEQ ID NO: 6964 - DNA, 25 bp, synthetic construct
  source 1..25: mol_type = other DNA; mol_type = other DNA
cccagccgcccgtgacccttacact

SEQ ID NO: 6965 - DNA, 25 bp, synthetic construct
  source 1..25: mol_type = other DNA; mol_type = other DNA
tcccagccgcccgtggcccttacgc

SEQ ID NO: 6966 - DNA, 25 bp, synthetic construct
  source 1..25: mol_type = other DNA; mol_type = other DNA
tcccagccgcccgtggcccttacac

SEQ ID NO: 6967 - DNA, 25 bp, synthetic construct
  source 1..25: mol_type = other DNA; mol_type = other DNA
tcccagccgcccgtgacccttacac

SEQ ID NO: 6968 - DNA, 25 bp, synthetic construct
  source 1..25: mol_type = other DNA; mol_type = other DNA
ctcccagccgcccgtggcccttaca

SEQ ID NO: 6969 - DNA, 25 bp, synthetic construct
  source 1..25: mol_type = other DNA; mol_type = other DNA
ctcccagccgcccgtgacccttaca

SEQ ID NO: 6970 - DNA, 25 bp, synthetic construct
  source 1..25: mol_type = other DNA; mol_type = other DNA
gctcccagccgcccgtggcccttac

SEQ ID NO: 6971 - DNA, 25 bp, synthetic construct
  source 1..25: mol_type = other DNA; mol_type = other DNA
gctcccagccgcccgtgacccttac

SEQ ID NO: 6972 - DNA, 25 bp, synthetic construct
  source 1..25: mol_type = other DNA; mol_type = other DNA
gctcccagccgcccgtaacccttac

SEQ ID NO: 6973 - DNA, 25 bp, synthetic construct
  source 1..25: mol_type = other DNA; mol_type = other DNA
cgctcccagccgcccgtggccctta

SEQ ID NO: 6974 - DNA, 25 bp, synthetic construct
  source 1..25: mol_type = other DNA; mol_type = other DNA
cgctcccagccgcccgtgaccctta

SEQ ID NO: 6975 - DNA, 25 bp, synthetic construct
  source 1..25: mol_type = other DNA; mol_type = other DNA
cgctcccagccgcccgtaaccctta

SEQ ID NO: 6976 - DNA, 25 bp, synthetic construct
  source 1..25: mol_type = other DNA; mol_type = other DNA
gcgctcccagccgcccgtgaccctt

SEQ ID NO: 6977 - DNA, 25 bp, synthetic construct
  source 1..25: mol_type = other DNA; mol_type = other DNA
gcgctcccagccgcccgtaaccctt

SEQ ID NO: 6978 - DNA, 25 bp, synthetic construct
  source 1..25: mol_type = other DNA; mol_type = other DNA
agcgctcccagccgcccgtggccct

SEQ ID NO: 6979 - DNA, 25 bp, synthetic construct
  source 1..25: mol_type = other DNA; mol_type = other DNA
agcgctcccagccgcccgtgaccct

SEQ ID NO: 6980 - DNA, 25 bp, synthetic construct
  source 1..25: mol_type = other DNA; mol_type = other DNA
agcgctcccagccgcccgtaaccct

SEQ ID NO: 6981 - DNA, 25 bp, synthetic construct
  source 1..25: mol_type = other DNA; mol_type = other DNA
cagcgctcccagccgcccgtggccc

SEQ ID NO: 6982 - DNA, 25 bp, synthetic construct
  source 1..25: mol_type = other DNA; mol_type = other DNA
cagcgctcccagccgcccgtgaccc

SEQ ID NO: 6983 - DNA, 25 bp, synthetic construct
  source 1..25: mol_type = other DNA; mol_type = other DNA
cagcgctcccagccgcccgtaaccc

SEQ ID NO: 6984 - DNA, 25 bp, synthetic construct
  source 1..25: mol_type = other DNA; mol_type = other DNA
ccagcgctcccagccgcccgtgacc

SEQ ID NO: 6985 - DNA, 25 bp, synthetic construct
  source 1..25: mol_type = other DNA; mol_type = other DNA
ccagcgctcccagccgcccgtaacc

SEQ ID NO: 6986 - DNA, 25 bp, synthetic construct
  source 1..25: mol_type = other DNA; mol_type = other DNA
cccagcgctcccagccgcccgtggc

SEQ ID NO: 6987 - DNA, 25 bp, synthetic construct
  source 1..25: mol_type = other DNA; mol_type = other DNA
cccagcgctcccagccgcccgtgac

SEQ ID NO: 6988 - DNA, 25 bp, synthetic construct
  source 1..25: mol_type = other DNA; mol_type = other DNA
cccagcgctcccagccgcccgtaac

SEQ ID NO: 6989 - DNA, 25 bp, synthetic construct
  source 1..25: mol_type = other DNA; mol_type = other DNA
acccagcgctcccagccgcccgtgg

SEQ ID NO: 6990 - DNA, 25 bp, synthetic construct
  source 1..25: mol_type = other DNA; mol_type = other DNA
acccagcgctcccagccgcccgtga

SEQ ID NO: 6991 - DNA, 25 bp, synthetic construct
  source 1..25: mol_type = other DNA; mol_type = other DNA
acccagcgctcccagccgcccgtaa

SEQ ID NO: 6992 - DNA, 25 bp, synthetic construct
  source 1..25: mol_type = other DNA; mol_type = other DNA
gacccagcgctcccagccgcccgta

SEQ ID NO: 6993 - DNA, 25 bp, synthetic construct
  source 1..25: mol_type = other DNA; mol_type = other DNA
gacccagcgctcccagccgcccata

SEQ ID NO: 6994 - DNA, 25 bp, synthetic construct
  source 1..25: mol_type = other DNA; mol_type = other DNA
cgacccagcgctcccagccgcccgt

SEQ ID NO: 6995 - DNA, 25 bp, synthetic construct
  source 1..25: mol_type = other DNA; mol_type = other DNA
cgacccagcgctcccagccgcccat

SEQ ID NO: 6996 - DNA, 25 bp, synthetic construct
  source 1..25: mol_type = other DNA; mol_type = other DNA
cgacccagcgctcccagccacccat

SEQ ID NO: 6997 - DNA, 25 bp, synthetic construct
  source 1..25: mol_type = other DNA; mol_type = other DNA
ccgacccagcgctcccagccgcccg

SEQ ID NO: 6998 - DNA, 25 bp, synthetic construct
  source 1..25: mol_type = other DNA; mol_type = other DNA
ccgacccagcgctcccagccgccca

SEQ ID NO: 6999 - DNA, 25 bp, synthetic construct
  source 1..25: mol_type = other DNA; mol_type = other DNA
ccgacccagcgctcccagccaccca

SEQ ID NO: 7000 - DNA, 25 bp, synthetic construct
  source 1..25: mol_type = other DNA; mol_type = other DNA
cccgacccagcgctcccagccaccc

SEQ ID NO: 7001 - DNA, 25 bp, synthetic construct
  source 1..25: mol_type = other DNA; mol_type = other DNA
cccgacccagcgctcccaaccaccc

SEQ ID NO: 7002 - DNA, 25 bp, synthetic construct
  source 1..25: mol_type = other DNA; mol_type = other DNA
gcccgacccagcgctcccagccgcc

SEQ ID NO: 7003 - DNA, 25 bp, synthetic construct
  source 1..25: mol_type = other DNA; mol_type = other DNA
gcccgacccagcgctcccagccacc

SEQ ID NO: 7004 - DNA, 25 bp, synthetic construct
  source 1..25: mol_type = other DNA; mol_type = other DNA
gcccgacccagcgctcccaaccacc

SEQ ID NO: 7005 - DNA, 25 bp, synthetic construct
  source 1..25: mol_type = other DNA; mol_type = other DNA
tgcccgacccagcgctcccagccgc

SEQ ID NO: 7006 - DNA, 25 bp, synthetic construct
  source 1..25: mol_type = other DNA; mol_type = other DNA
tgcccgacccagcgctcccagccac

SEQ ID NO: 7007 - DNA, 25 bp, synthetic construct
  source 1..25: mol_type = other DNA; mol_type = other DNA
tgcccgacccagcgctcccaaccac

SEQ ID NO: 7008 - DNA, 25 bp, synthetic construct
  source 1..25: mol_type = other DNA; mol_type = other DNA
ctgcccgacccagcgctcccagcca

SEQ ID NO: 7009 - DNA, 25 bp, synthetic construct
  source 1..25: mol_type = other DNA; mol_type = other DNA
ctgcccgacccagcgctcccaacca

SEQ ID NO: 7010 - DNA, 25 bp, synthetic construct
  source 1..25: mol_type = other DNA; mol_type = other DNA
cctgcccgacccagcgctcccagcc

SEQ ID NO: 7011 - DNA, 25 bp, synthetic construct
  source 1..25: mol_type = other DNA; mol_type = other DNA
cctgcccgacccagcgctcccaacc

SEQ ID NO: 7012 - DNA, 25 bp, synthetic construct
  source 1..25: mol_type = other DNA; mol_type = other DNA
cctgcccgacccagcactcccaacc

SEQ ID NO: 7013 - DNA, 25 bp, synthetic construct
  source 1..25: mol_type = other DNA; mol_type = other DNA
gcctgcccgacccagcgctcccagc

SEQ ID NO: 7014 - DNA, 25 bp, synthetic construct
  source 1..25: mol_type = other DNA; mol_type = other DNA
gcctgcccgacccagcgctcccaac

SEQ ID NO: 7015 - DNA, 25 bp, synthetic construct
  source 1..25: mol_type = other DNA; mol_type = other DNA
gcctgcccgacccagcactcccaac

SEQ ID NO: 7016 - DNA, 25 bp, synthetic construct
  source 1..25: mol_type = other DNA; mol_type = other DNA
tgcctgcccgacccagcgctcccaa

SEQ ID NO: 7017 - DNA, 25 bp, synthetic construct
  source 1..25: mol_type = other DNA; mol_type = other DNA
tgcctgcccgacccagcactcccaa

SEQ ID NO: 7018 - DNA, 25 bp, synthetic construct
  source 1..25: mol_type = other DNA; mol_type = other DNA
atgcctgcccgacccagcgctccca

SEQ ID NO: 7019 - DNA, 25 bp, synthetic construct
  source 1..25: mol_type = other DNA; mol_type = other DNA
atgcctgcccgacccagcactccca

SEQ ID NO: 7020 - DNA, 25 bp, synthetic construct
  source 1..25: mol_type = other DNA; mol_type = other DNA
atgcctgcccgacccaacactccca

SEQ ID NO: 7021 - DNA, 25 bp, synthetic construct
  source 1..25: mol_type = other DNA; mol_type = other DNA
catgcctgcccgacccagcgctccc

SEQ ID NO: 7022 - DNA, 25 bp, synthetic construct
  source 1..25: mol_type = other DNA; mol_type = other DNA
catgcctgcccgacccagcactccc

SEQ ID NO: 7023 - DNA, 25 bp, synthetic construct
  source 1..25: mol_type = other DNA; mol_type = other DNA
catgcctgcccgacccaacactccc

SEQ ID NO: 7024 - DNA, 25 bp, synthetic construct
  source 1..25: mol_type = other DNA; mol_type = other DNA
ccatgcctgcccgacccagcactcc

SEQ ID NO: 7025 - DNA, 25 bp, synthetic construct
  source 1..25: mol_type = other DNA; mol_type = other DNA
ccatgcctgcccgacccaacactcc

SEQ ID NO: 7026 - DNA, 25 bp, synthetic construct
  source 1..25: mol_type = other DNA; mol_type = other DNA
cccatgcctgcccgacccagcgctc

SEQ ID NO: 7027 - DNA, 25 bp, synthetic construct
  source 1..25: mol_type = other DNA; mol_type = other DNA
cccatgcctgcccgacccagcactc

SEQ ID NO: 7028 - DNA, 25 bp, synthetic construct
  source 1..25: mol_type = other DNA; mol_type = other DNA
cccatgcctgcccgacccaacactc

SEQ ID NO: 7029 - DNA, 25 bp, synthetic construct
  source 1..25: mol_type = other DNA; mol_type = other DNA
ccccatgcctgcccgacccagcgct

SEQ ID NO: 7030 - DNA, 25 bp, synthetic construct
  source 1..25: mol_type = other DNA; mol_type = other DNA
ccccatgcctgcccgacccagcact

SEQ ID NO: 7031 - DNA, 25 bp, synthetic construct
  source 1..25: mol_type = other DNA; mol_type = other DNA
ccccatgcctgcccgacccaacact

SEQ ID NO: 7032 - DNA, 25 bp, synthetic construct
  source 1..25: mol_type = other DNA; mol_type = other DNA
cccccatgcctgcccgacccagcac

SEQ ID NO: 7033 - DNA, 25 bp, synthetic construct
  source 1..25: mol_type = other DNA; mol_type = other DNA
cccccatgcctgcccgacccaacac

SEQ ID NO: 7034 - DNA, 25 bp, synthetic construct
  source 1..25: mol_type = other DNA; mol_type = other DNA
acccccatgcctgcccgacccagcg

SEQ ID NO: 7035 - DNA, 25 bp, synthetic construct
  source 1..25: mol_type = other DNA; mol_type = other DNA
acccccatgcctgcccgacccagca

SEQ ID NO: 7036 - DNA, 25 bp, synthetic construct
  source 1..25: mol_type = other DNA; mol_type = other DNA
acccccatgcctgcccgacccaaca

SEQ ID NO: 7037 - DNA, 25 bp, synthetic construct
  source 1..25: mol_type = other DNA; mol_type = other DNA
gacccccatgcctgcccgacccagc

SEQ ID NO: 7038 - DNA, 25 bp, synthetic construct
  source 1..25: mol_type = other DNA; mol_type = other DNA
gacccccatgcctgcccgacccaac

SEQ ID NO: 7039 - DNA, 25 bp, synthetic construct
  source 1..25: mol_type = other DNA; mol_type = other DNA
gacccccatgcctgcccaacccaac

SEQ ID NO: 7040 - DNA, 25 bp, synthetic construct
  source 1..25: mol_type = other DNA; mol_type = other DNA
tgacccccatgcctgcccgacccaa

SEQ ID NO: 7041 - DNA, 25 bp, synthetic construct
  source 1..25: mol_type = other DNA; mol_type = other DNA
tgacccccatgcctgcccaacccaa

SEQ ID NO: 7042 - DNA, 25 bp, synthetic construct
  source 1..25: mol_type = other DNA; mol_type = other DNA
ctgacccccatgcctgcccgaccca

SEQ ID NO: 7043 - DNA, 25 bp, synthetic construct
  source 1..25: mol_type = other DNA; mol_type = other DNA
ctgacccccatgcctgcccaaccca

SEQ ID NO: 7044 - DNA, 25 bp, synthetic construct
  source 1..25: mol_type = other DNA; mol_type = other DNA
ctgacccccatgcctacccaaccca

SEQ ID NO: 7045 - DNA, 25 bp, synthetic construct
  source 1..25: mol_type = other DNA; mol_type = other DNA
tctgacccccatgcctgcccgaccc

SEQ ID NO: 7046 - DNA, 25 bp, synthetic construct
  source 1..25: mol_type = other DNA; mol_type = other DNA
tctgacccccatgcctgcccaaccc

SEQ ID NO: 7047 - DNA, 25 bp, synthetic construct
  source 1..25: mol_type = other DNA; mol_type = other DNA
tctgacccccatgcctacccaaccc

SEQ ID NO: 7048 - DNA, 25 bp, synthetic construct
  source 1..25: mol_type = other DNA; mol_type = other DNA
gtctgacccccatgcctgcccaacc

SEQ ID NO: 7049 - DNA, 25 bp, synthetic construct
  source 1..25: mol_type = other DNA; mol_type = other DNA
gtctgacccccatgcctacccaacc

SEQ ID NO: 7050 - DNA, 25 bp, synthetic construct
  source 1..25: mol_type = other DNA; mol_type = other DNA
agtctgacccccatgcctgcccgac

SEQ ID NO: 7051 - DNA, 25 bp, synthetic construct
  source 1..25: mol_type = other DNA; mol_type = other DNA
agtctgacccccatgcctgcccaac

SEQ ID NO: 7052 - DNA, 25 bp, synthetic construct
  source 1..25: mol_type = other DNA; mol_type = other DNA
agtctgacccccatgcctacccaac

SEQ ID NO: 7053 - DNA, 25 bp, synthetic construct
  source 1..25: mol_type = other DNA; mol_type = other DNA
cagtctgacccccatgcctgcccga

SEQ ID NO: 7054 - DNA, 25 bp, synthetic construct
  source 1..25: mol_type = other DNA; mol_type = other DNA
cagtctgacccccatgcctgcccaa

SEQ ID NO: 7055 - DNA, 25 bp, synthetic construct
  source 1..25: mol_type = other DNA; mol_type = other DNA
cagtctgacccccatgcctacccaa

SEQ ID NO: 7056 - DNA, 25 bp, synthetic construct
  source 1..25: mol_type = other DNA; mol_type = other DNA
acagtctgacccccatgcctgccca

SEQ ID NO: 7057 - DNA, 25 bp, synthetic construct
  source 1..25: mol_type = other DNA; mol_type = other DNA
acagtctgacccccatgcctaccca

SEQ ID NO: 7058 - DNA, 25 bp, synthetic construct
  source 1..25: mol_type = other DNA; mol_type = other DNA
gacagtctgacccccatgcctgccc

SEQ ID NO: 7059 - DNA, 25 bp, synthetic construct
  source 1..25: mol_type = other DNA; mol_type = other DNA
gacagtctgacccccatgcctaccc

SEQ ID NO: 7060 - DNA, 25 bp, synthetic construct
  source 1..25: mol_type = other DNA; mol_type = other DNA
gacagtctgacccccatacctaccc

SEQ ID NO: 7061 - DNA, 25 bp, synthetic construct
  source 1..25: mol_type = other DNA; mol_type = other DNA
ggacagtctgacccccatgcctgcc

SEQ ID NO: 7062 - DNA, 25 bp, synthetic construct
  source 1..25: mol_type = other DNA; mol_type = other DNA
ggacagtctgacccccatgcctacc

SEQ ID NO: 7063 - DNA, 25 bp, synthetic construct
  source 1..25: mol_type = other DNA; mol_type = other DNA
ggacagtctgacccccatacctacc

SEQ ID NO: 7064 - DNA, 25 bp, synthetic construct
  source 1..25: mol_type = other DNA; mol_type = other DNA
aggacagtctgacccccatgcctac

SEQ ID NO: 7065 - DNA, 25 bp, synthetic construct
  source 1..25: mol_type = other DNA; mol_type = other DNA
aggacagtctgacccccatacctac

SEQ ID NO: 7066 - DNA, 25 bp, synthetic construct
  source 1..25: mol_type = other DNA; mol_type = other DNA
caggacagtctgacccccatgcctg

SEQ ID NO: 7067 - DNA, 25 bp, synthetic construct
  source 1..25: mol_type = other DNA; mol_type = other DNA
caggacagtctgacccccatgccta

SEQ ID NO: 7068 - DNA, 25 bp, synthetic construct
  source 1..25: mol_type = other DNA; mol_type = other DNA
caggacagtctgacccccataccta

SEQ ID NO: 7069 - DNA, 25 bp, synthetic construct
  source 1..25: mol_type = other DNA; mol_type = other DNA
ccaggacagtctgacccccatgcct

SEQ ID NO: 7070 - DNA, 25 bp, synthetic construct
  source 1..25: mol_type = other DNA; mol_type = other DNA
ccaggacagtctgacccccatacct

SEQ ID NO: 7071 - DNA, 25 bp, synthetic construct
  source 1..25: mol_type = other DNA; mol_type = other DNA
ccaggacagtctaacccccatacct

SEQ ID NO: 7072 - DNA, 25 bp, synthetic construct
  source 1..25: mol_type = other DNA; mol_type = other DNA
cccaggacagtctgacccccatacc

SEQ ID NO: 7073 - DNA, 25 bp, synthetic construct
  source 1..25: mol_type = other DNA; mol_type = other DNA
cccaggacagtctaacccccatacc

SEQ ID NO: 7074 - DNA, 25 bp, synthetic construct
  source 1..25: mol_type = other DNA; mol_type = other DNA
gcccaggacagtctgacccccatgc

SEQ ID NO: 7075 - DNA, 25 bp, synthetic construct
  source 1..25: mol_type = other DNA; mol_type = other DNA
gcccaggacagtctgacccccatac

SEQ ID NO: 7076 - DNA, 25 bp, synthetic construct
  source 1..25: mol_type = other DNA; mol_type = other DNA
gcccaggacagtctaacccccatac

SEQ ID NO: 7077 - DNA, 25 bp, synthetic construct
  source 1..25: mol_type = other DNA; mol_type = other DNA
ggcccaggacagtctgacccccatg

SEQ ID NO: 7078 - DNA, 25 bp, synthetic construct
  source 1..25: mol_type = other DNA; mol_type = other DNA
ggcccaggacagtctgacccccata

SEQ ID NO: 7079 - DNA, 25 bp, synthetic construct
  source 1..25: mol_type = other DNA; mol_type = other DNA
ggcccaggacagtctaacccccata

SEQ ID NO: 7080 - DNA, 25 bp, synthetic construct
  source 1..25: mol_type = other DNA; mol_type = other DNA
gggcccaggacagtctaacccccat

SEQ ID NO: 7081 - DNA, 25 bp, synthetic construct
  source 1..25: mol_type = other DNA; mol_type = other DNA
gggcccaggacaatctaacccccat

SEQ ID NO: 7082 - DNA, 25 bp, synthetic construct
  source 1..25: mol_type = other DNA; mol_type = other DNA
agggcccaggacagtctgaccccca

SEQ ID NO: 7083 - DNA, 25 bp, synthetic construct
  source 1..25: mol_type = other DNA; mol_type = other DNA
agggcccaggacagtctaaccccca

SEQ ID NO: 7084 - DNA, 25 bp, synthetic construct
  source 1..25: mol_type = other DNA; mol_type = other DNA
agggcccaggacaatctaaccccca

SEQ ID NO: 7085 - DNA, 25 bp, synthetic construct
  source 1..25: mol_type = other DNA; mol_type = other DNA
gagggcccaggacagtctgaccccc

SEQ ID NO: 7086 - DNA, 25 bp, synthetic construct
  source 1..25: mol_type = other DNA; mol_type = other DNA
gagggcccaggacagtctaaccccc

SEQ ID NO: 7087 - DNA, 25 bp, synthetic construct
  source 1..25: mol_type = other DNA; mol_type = other DNA
gagggcccaggacaatctaaccccc

SEQ ID NO: 7088 - DNA, 25 bp, synthetic construct
  source 1..25: mol_type = other DNA; mol_type = other DNA
agagggcccaggacagtctaacccc

SEQ ID NO: 7089 - DNA, 25 bp, synthetic construct
  source 1..25: mol_type = other DNA; mol_type = other DNA
agagggcccaggacaatctaacccc

SEQ ID NO: 7090 - DNA, 25 bp, synthetic construct
  source 1..25: mol_type = other DNA; mol_type = other DNA
aagagggcccaggacagtctgaccc

SEQ ID NO: 7091 - DNA, 25 bp, synthetic construct
  source 1..25: mol_type = other DNA; mol_type = other DNA
aagagggcccaggacagtctaaccc

SEQ ID NO: 7092 - DNA, 25 bp, synthetic construct
  source 1..25: mol_type = other DNA; mol_type = other DNA
aagagggcccaggacaatctaaccc

SEQ ID NO: 7093 - DNA, 25 bp, synthetic construct
  source 1..25: mol_type = other DNA; mol_type = other DNA
caagagggcccaggacagtctgacc

SEQ ID NO: 7094 - DNA, 25 bp, synthetic construct
  source 1..25: mol_type = other DNA; mol_type = other DNA
caagagggcccaggacagtctaacc

SEQ ID NO: 7095 - DNA, 25 bp, synthetic construct
  source 1..25: mol_type = other DNA; mol_type = other DNA
caagagggcccaggacaatctaacc

SEQ ID NO: 7096 - DNA, 25 bp, synthetic construct
  source 1..25: mol_type = other DNA; mol_type = other DNA
tcaagagggcccaggacagtctaac

SEQ ID NO: 7097 - DNA, 25 bp, synthetic construct
  source 1..25: mol_type = other DNA; mol_type = other DNA
tcaagagggcccaggacaatctaac

SEQ ID NO: 7098 - DNA, 25 bp, synthetic construct
  source 1..25: mol_type = other DNA; mol_type = other DNA
gtcaagagggcccaggacagtctga

SEQ ID NO: 7099 - DNA, 25 bp, synthetic construct
  source 1..25: mol_type = other DNA; mol_type = other DNA
gtcaagagggcccaggacagtctaa

SEQ ID NO: 7100 - DNA, 25 bp, synthetic construct
  source 1..25: mol_type = other DNA; mol_type = other DNA
gtcaagagggcccaggacaatctaa

SEQ ID NO: 7101 - DNA, 25 bp, synthetic construct
  source 1..25: mol_type = other DNA; mol_type = other DNA
cgtcaagagggcccaggacagtctg

SEQ ID NO: 7102 - DNA, 25 bp, synthetic construct
  source 1..25: mol_type = other DNA; mol_type = other DNA
cgtcaagagggcccaggacagtcta

SEQ ID NO: 7103 - DNA, 25 bp, synthetic construct
  source 1..25: mol_type = other DNA; mol_type = other DNA
cgtcaagagggcccaggacaatcta

SEQ ID NO: 7104 - DNA, 25 bp, synthetic construct
  source 1..25: mol_type = other DNA; mol_type = other DNA
ccgtcaagagggcccaggacaatct

SEQ ID NO: 7105 - DNA, 25 bp, synthetic construct
  source 1..25: mol_type = other DNA; mol_type = other DNA
ccgtcaagagggcccagaacaatct

SEQ ID NO: 7106 - DNA, 25 bp, synthetic construct
  source 1..25: mol_type = other DNA; mol_type = other DNA
tccgtcaagagggcccaggacagtc

SEQ ID NO: 7107 - DNA, 25 bp, synthetic construct
  source 1..25: mol_type = other DNA; mol_type = other DNA
tccgtcaagagggcccaggacaatc

SEQ ID NO: 7108 - DNA, 25 bp, synthetic construct
  source 1..25: mol_type = other DNA; mol_type = other DNA
tccgtcaagagggcccagaacaatc

SEQ ID NO: 7109 - DNA, 25 bp, synthetic construct
  source 1..25: mol_type = other DNA; mol_type = other DNA
ctccgtcaagagggcccaggacagt

SEQ ID NO: 7110 - DNA, 25 bp, synthetic construct
  source 1..25: mol_type = other DNA; mol_type = other DNA
ctccgtcaagagggcccaggacaat

SEQ ID NO: 7111 - DNA, 25 bp, synthetic construct
  source 1..25: mol_type = other DNA; mol_type = other DNA
ctccgtcaagagggcccagaacaat

SEQ ID NO: 7112 - DNA, 25 bp, synthetic construct
  source 1..25: mol_type = other DNA; mol_type = other DNA
cctccgtcaagagggcccaggacaa

SEQ ID NO: 7113 - DNA, 25 bp, synthetic construct
  source 1..25: mol_type = other DNA; mol_type = other DNA
cctccgtcaagagggcccagaacaa

SEQ ID NO: 7114 - DNA, 25 bp, synthetic construct
  source 1..25: mol_type = other DNA; mol_type = other DNA
acctccgtcaagagggcccaggaca

SEQ ID NO: 7115 - DNA, 25 bp, synthetic construct
  source 1..25: mol_type = other DNA; mol_type = other DNA
acctccgtcaagagggcccagaaca

SEQ ID NO: 7116 - DNA, 25 bp, synthetic construct
  source 1..25: mol_type = other DNA; mol_type = other DNA
acctccgtcaagagggcccaaaaca

SEQ ID NO: 7117 - DNA, 25 bp, synthetic construct
  source 1..25: mol_type = other DNA; mol_type = other DNA
cacctccgtcaagagggcccaggac

SEQ ID NO: 7118 - DNA, 25 bp, synthetic construct
  source 1..25: mol_type = other DNA; mol_type = other DNA
cacctccgtcaagagggcccagaac

SEQ ID NO: 7119 - DNA, 25 bp, synthetic construct
  source 1..25: mol_type = other DNA; mol_type = other DNA
cacctccgtcaagagggcccaaaac

SEQ ID NO: 7120 - DNA, 25 bp, synthetic construct
  source 1..25: mol_type = other DNA; mol_type = other DNA
tcacctccgtcaagagggcccagaa

SEQ ID NO: 7121 - DNA, 25 bp, synthetic construct
  source 1..25: mol_type = other DNA; mol_type = other DNA
tcacctccgtcaagagggcccaaaa

SEQ ID NO: 7122 - DNA, 25 bp, synthetic construct
  source 1..25: mol_type = other DNA; mol_type = other DNA
ctcacctccgtcaagagggcccagg

SEQ ID NO: 7123 - DNA, 25 bp, synthetic construct
  source 1..25: mol_type = other DNA; mol_type = other DNA
ctcacctccgtcaagagggcccaga

SEQ ID NO: 7124 - DNA, 25 bp, synthetic construct
  source 1..25: mol_type = other DNA; mol_type = other DNA
ctcacctccgtcaagagggcccaaa

SEQ ID NO: 7125 - DNA, 25 bp, synthetic construct
  source 1..25: mol_type = other DNA; mol_type = other DNA
tctcacctccgtcaagagggcccag

SEQ ID NO: 7126 - DNA, 25 bp, synthetic construct
  source 1..25: mol_type = other DNA; mol_type = other DNA
tctcacctccgtcaagagggcccaa

SEQ ID NO: 7127 - DNA, 25 bp, synthetic construct
  source 1..25: mol_type = other DNA; mol_type = other DNA
tctcacctccgtcaagaggacccaa

SEQ ID NO: 7128 - DNA, 25 bp, synthetic construct
  source 1..25: mol_type = other DNA; mol_type = other DNA
ctctcacctccgtcaagaggaccca

SEQ ID NO: 7129 - DNA, 25 bp, synthetic construct
  source 1..25: mol_type = other DNA; mol_type = other DNA
ctctcacctccgtcaagagaaccca

SEQ ID NO: 7130 - DNA, 25 bp, synthetic construct
  source 1..25: mol_type = other DNA; mol_type = other DNA
gctctcacctccgtcaagagggccc

SEQ ID NO: 7131 - DNA, 25 bp, synthetic construct
  source 1..25: mol_type = other DNA; mol_type = other DNA
gctctcacctccgtcaagaggaccc

SEQ ID NO: 7132 - DNA, 25 bp, synthetic construct
  source 1..25: mol_type = other DNA; mol_type = other DNA
gctctcacctccgtcaagagaaccc

SEQ ID NO: 7133 - DNA, 25 bp, synthetic construct
  source 1..25: mol_type = other DNA; mol_type = other DNA
ggctctcacctccgtcaagagggcc

SEQ ID NO: 7134 - DNA, 25 bp, synthetic construct
  source 1..25: mol_type = other DNA; mol_type = other DNA
ggctctcacctccgtcaagaggacc

SEQ ID NO: 7135 - DNA, 25 bp, synthetic construct
  source 1..25: mol_type = other DNA; mol_type = other DNA
ggctctcacctccgtcaagagaacc

SEQ ID NO: 7136 - DNA, 25 bp, synthetic construct
  source 1..25: mol_type = other DNA; mol_type = other DNA
aggctctcacctccgtcaagaggac

SEQ ID NO: 7137 - DNA, 25 bp, synthetic construct
  source 1..25: mol_type = other DNA; mol_type = other DNA
aggctctcacctccgtcaagagaac

SEQ ID NO: 7138 - DNA, 25 bp, synthetic construct
  source 1..25: mol_type = other DNA; mol_type = other DNA
taggctctcacctccgtcaagaggg

SEQ ID NO: 7139 - DNA, 25 bp, synthetic construct
  source 1..25: mol_type = other DNA; mol_type = other DNA
taggctctcacctccgtcaagagga

SEQ ID NO: 7140 - DNA, 25 bp, synthetic construct
  source 1..25: mol_type = other DNA; mol_type = other DNA
taggctctcacctccgtcaagagaa

SEQ ID NO: 7141 - DNA, 25 bp, synthetic construct
  source 1..25: mol_type = other DNA; mol_type = other DNA
ataggctctcacctccgtcaagagg

SEQ ID NO: 7142 - DNA, 25 bp, synthetic construct
  source 1..25: mol_type = other DNA; mol_type = other DNA
ataggctctcacctccgtcaagaga

SEQ ID NO: 7143 - DNA, 25 bp, synthetic construct
  source 1..25: mol_type = other DNA; mol_type = other DNA
ataggctctcacctccgtcaagaaa

SEQ ID NO: 7144 - DNA, 25 bp, synthetic construct
  source 1..25: mol_type = other DNA; mol_type = other DNA
gataggctctcacctccgtcaagaa

SEQ ID NO: 7145 - DNA, 25 bp, synthetic construct
  source 1..25: mol_type = other DNA; mol_type = other DNA
gataggctctcacctccgtcaaaaa

SEQ ID NO: 7146 - DNA, 25 bp, synthetic construct
  source 1..25: mol_type = other DNA; mol_type = other DNA
tgataggctctcacctccgtcaaga

SEQ ID NO: 7147 - DNA, 25 bp, synthetic construct
  source 1..25: mol_type = other DNA; mol_type = other DNA
tgataggctctcacctccgtcaaaa

SEQ ID NO: 7148 - DNA, 25 bp, synthetic construct
  source 1..25: mol_type = other DNA; mol_type = other DNA
tgataggctctcacctccatcaaaa

SEQ ID NO: 7149 - DNA, 25 bp, synthetic construct
  source 1..25: mol_type = other DNA; mol_type = other DNA
atgataggctctcacctccgtcaag

SEQ ID NO: 7150 - DNA, 25 bp, synthetic construct
  source 1..25: mol_type = other DNA; mol_type = other DNA
atgataggctctcacctccgtcaaa

SEQ ID NO: 7151 - DNA, 25 bp, synthetic construct
  source 1..25: mol_type = other DNA; mol_type = other DNA
atgataggctctcacctccatcaaa

SEQ ID NO: 7152 - DNA, 25 bp, synthetic construct
  source 1..25: mol_type = other DNA; mol_type = other DNA
catgataggctctcacctccatcaa

SEQ ID NO: 7153 - DNA, 25 bp, synthetic construct
  source 1..25: mol_type = other DNA; mol_type = other DNA
catgatagactctcacctccatcaa

SEQ ID NO: 7154 - DNA, 25 bp, synthetic construct
  source 1..25: mol_type = other DNA; mol_type = other DNA
acatgataggctctcacctccgtca

SEQ ID NO: 7155 - DNA, 25 bp, synthetic construct
  source 1..25: mol_type = other DNA; mol_type = other DNA
acatgataggctctcacctccatca

SEQ ID NO: 7156 - DNA, 25 bp, synthetic construct
  source 1..25: mol_type = other DNA; mol_type = other DNA
acatgatagactctcacctccatca

SEQ ID NO: 7157 - DNA, 25 bp, synthetic construct
  source 1..25: mol_type = other DNA; mol_type = other DNA
cacatgataggctctcacctccgtc

SEQ ID NO: 7158 - DNA, 25 bp, synthetic construct
  source 1..25: mol_type = other DNA; mol_type = other DNA
cacatgataggctctcacctccatc

SEQ ID NO: 7159 - DNA, 25 bp, synthetic construct
  source 1..25: mol_type = other DNA; mol_type = other DNA
cacatgatagactctcacctccatc

SEQ ID NO: 7160 - DNA, 25 bp, synthetic construct
  source 1..25: mol_type = other DNA; mol_type = other DNA
ccacatgataggctctcacctccat

SEQ ID NO: 7161 - DNA, 25 bp, synthetic construct
  source 1..25: mol_type = other DNA; mol_type = other DNA
ccacatgatagactctcacctccat

SEQ ID NO: 7162 - DNA, 25 bp, synthetic construct
  source 1..25: mol_type = other DNA; mol_type = other DNA
tccacatgataggctctcacctccg

SEQ ID NO: 7163 - DNA, 25 bp, synthetic construct
  source 1..25: mol_type = other DNA; mol_type = other DNA
tccacatgataggctctcacctcca

SEQ ID NO: 7164 - DNA, 25 bp, synthetic construct
  source 1..25: mol_type = other DNA; mol_type = other DNA
tccacatgatagactctcacctcca

SEQ ID NO: 7165 - DNA, 25 bp, synthetic construct
  source 1..25: mol_type = other DNA; mol_type = other DNA
gtccacatgataggctctcacctcc

SEQ ID NO: 7166 - DNA, 25 bp, synthetic construct
  source 1..25: mol_type = other DNA; mol_type = other DNA
gtccacatgatagactctcacctcc

SEQ ID NO: 7167 - DNA, 25 bp, synthetic construct
  source 1..25: mol_type = other DNA; mol_type = other DNA
gtccacatgataaactctcacctcc

SEQ ID NO: 7168 - DNA, 25 bp, synthetic construct
  source 1..25: mol_type = other DNA; mol_type = other DNA
ggtccacatgatagactctcacctc

SEQ ID NO: 7169 - DNA, 25 bp, synthetic construct
  source 1..25: mol_type = other DNA; mol_type = other DNA
ggtccacatgataaactctcacctc

SEQ ID NO: 7170 - DNA, 25 bp, synthetic construct
  source 1..25: mol_type = other DNA; mol_type = other DNA
gggtccacatgataggctctcacct

SEQ ID NO: 7171 - DNA, 25 bp, synthetic construct
  source 1..25: mol_type = other DNA; mol_type = other DNA
gggtccacatgatagactctcacct

SEQ ID NO: 7172 - DNA, 25 bp, synthetic construct
  source 1..25: mol_type = other DNA; mol_type = other DNA
gggtccacatgataaactctcacct

SEQ ID NO: 7173 - DNA, 25 bp, synthetic construct
  source 1..25: mol_type = other DNA; mol_type = other DNA
gagacaccccacactctcactccaa

SEQ ID NO: 7174 - DNA, 25 bp, synthetic construct
  source 1..25: mol_type = other DNA; mol_type = other DNA
gaaacaccccacactctcactccaa

SEQ ID NO: 7175 - DNA, 25 bp, synthetic construct
  source 1..25: mol_type = other DNA; mol_type = other DNA
tgagacaccccacgctctcactcca

SEQ ID NO: 7176 - DNA, 25 bp, synthetic construct
  source 1..25: mol_type = other DNA; mol_type = other DNA
tgagacaccccacactctcactcca

SEQ ID NO: 7177 - DNA, 25 bp, synthetic construct
  source 1..25: mol_type = other DNA; mol_type = other DNA
tgaaacaccccacactctcactcca

SEQ ID NO: 7178 - DNA, 25 bp, synthetic construct
  source 1..25: mol_type = other DNA; mol_type = other DNA
gtgagacaccccacgctctcactcc

SEQ ID NO: 7179 - DNA, 25 bp, synthetic construct
  source 1..25: mol_type = other DNA; mol_type = other DNA
gtgagacaccccacactctcactcc

SEQ ID NO: 7180 - DNA, 25 bp, synthetic construct
  source 1..25: mol_type = other DNA; mol_type = other DNA
gtgaaacaccccacactctcactcc

SEQ ID NO: 7181 - DNA, 25 bp, synthetic construct
  source 1..25: mol_type = other DNA; mol_type = other DNA
ggtgagacaccccacactctcactc

SEQ ID NO: 7182 - DNA, 25 bp, synthetic construct
  source 1..25: mol_type = other DNA; mol_type = other DNA
ggtgaaacaccccacactctcactc

SEQ ID NO: 7183 - DNA, 25 bp, synthetic construct
  source 1..25: mol_type = other DNA; mol_type = other DNA
aggtgagacaccccacgctctcact

SEQ ID NO: 7184 - DNA, 25 bp, synthetic construct
  source 1..25: mol_type = other DNA; mol_type = other DNA
aggtgagacaccccacactctcact

SEQ ID NO: 7185 - DNA, 25 bp, synthetic construct
  source 1..25: mol_type = other DNA; mol_type = other DNA
aggtgaaacaccccacactctcact

SEQ ID NO: 7186 - DNA, 25 bp, synthetic construct
  source 1..25: mol_type = other DNA; mol_type = other DNA
gaggtgagacaccccacgctctcac

SEQ ID NO: 7187 - DNA, 25 bp, synthetic construct
  source 1..25: mol_type = other DNA; mol_type = other DNA
gaggtgagacaccccacactctcac

SEQ ID NO: 7188 - DNA, 25 bp, synthetic construct
  source 1..25: mol_type = other DNA; mol_type = other DNA
gaggtgaaacaccccacactctcac

SEQ ID NO: 7189 - DNA, 25 bp, synthetic construct
  source 1..25: mol_type = other DNA; mol_type = other DNA
agaggtgagacaccccacactctca

SEQ ID NO: 7190 - DNA, 25 bp, synthetic construct
  source 1..25: mol_type = other DNA; mol_type = other DNA
agaggtgaaacaccccacactctca

SEQ ID NO: 7191 - DNA, 25 bp, synthetic construct
  source 1..25: mol_type = other DNA; mol_type = other DNA
cagaggtgagacaccccacgctctc

SEQ ID NO: 7192 - DNA, 25 bp, synthetic construct
  source 1..25: mol_type = other DNA; mol_type = other DNA
cagaggtgagacaccccacactctc

SEQ ID NO: 7193 - DNA, 25 bp, synthetic construct
  source 1..25: mol_type = other DNA; mol_type = other DNA
cagaggtgaaacaccccacactctc

SEQ ID NO: 7194 - DNA, 25 bp, synthetic construct
  source 1..25: mol_type = other DNA; mol_type = other DNA
ccagaggtgagacaccccacgctct

SEQ ID NO: 7195 - DNA, 25 bp, synthetic construct
  source 1..25: mol_type = other DNA; mol_type = other DNA
ccagaggtgagacaccccacactct

SEQ ID NO: 7196 - DNA, 25 bp, synthetic construct
  source 1..25: mol_type = other DNA; mol_type = other DNA
ccagaggtgaaacaccccacactct

SEQ ID NO: 7197 - DNA, 25 bp, synthetic construct
  source 1..25: mol_type = other DNA; mol_type = other DNA
gccagaggtgagacaccccacactc

SEQ ID NO: 7198 - DNA, 25 bp, synthetic construct
  source 1..25: mol_type = other DNA; mol_type = other DNA
gccagaggtgaaacaccccacactc

SEQ ID NO: 7199 - DNA, 25 bp, synthetic construct
  source 1..25: mol_type = other DNA; mol_type = other DNA
agccagaggtgagacaccccacgct

SEQ ID NO: 7200 - DNA, 25 bp, synthetic construct
  source 1..25: mol_type = other DNA; mol_type = other DNA
agccagaggtgagacaccccacact

SEQ ID NO: 7201 - DNA, 25 bp, synthetic construct
  source 1..25: mol_type = other DNA; mol_type = other DNA
agccagaggtgaaacaccccacact

SEQ ID NO: 7202 - DNA, 25 bp, synthetic construct
  source 1..25: mol_type = other DNA; mol_type = other DNA
aagccagaggtgagacaccccacgc

SEQ ID NO: 7203 - DNA, 25 bp, synthetic construct
  source 1..25: mol_type = other DNA; mol_type = other DNA
aagccagaggtgagacaccccacac

SEQ ID NO: 7204 - DNA, 25 bp, synthetic construct
  source 1..25: mol_type = other DNA; mol_type = other DNA
aagccagaggtgaaacaccccacac

SEQ ID NO: 7205 - DNA, 25 bp, synthetic construct
  source 1..25: mol_type = other DNA; mol_type = other DNA
taagccagaggtgagacaccccaca

SEQ ID NO: 7206 - DNA, 25 bp, synthetic construct
  source 1..25: mol_type = other DNA; mol_type = other DNA
taagccagaggtgaaacaccccaca

SEQ ID NO: 7207 - DNA, 25 bp, synthetic construct
  source 1..25: mol_type = other DNA; mol_type = other DNA
ctaagccagaggtgagacaccccac

SEQ ID NO: 7208 - DNA, 25 bp, synthetic construct
  source 1..25: mol_type = other DNA; mol_type = other DNA
ctaagccagaggtgaaacaccccac

SEQ ID NO: 7209 - DNA, 25 bp, synthetic construct
  source 1..25: mol_type = other DNA; mol_type = other DNA
ctaagccagaggtaaaacaccccac

SEQ ID NO: 7210 - DNA, 25 bp, synthetic construct
  source 1..25: mol_type = other DNA; mol_type = other DNA
cctaagccagaggtgagacacccca

SEQ ID NO: 7211 - DNA, 25 bp, synthetic construct
  source 1..25: mol_type = other DNA; mol_type = other DNA
cctaagccagaggtgaaacacccca

SEQ ID NO: 7212 - DNA, 25 bp, synthetic construct
  source 1..25: mol_type = other DNA; mol_type = other DNA
cctaagccagaggtaaaacacccca

SEQ ID NO: 7213 - DNA, 25 bp, synthetic construct
  source 1..25: mol_type = other DNA; mol_type = other DNA
tcctaagccagaggtgaaacacccc

SEQ ID NO: 7214 - DNA, 25 bp, synthetic construct
  source 1..25: mol_type = other DNA; mol_type = other DNA
tcctaagccagaggtaaaacacccc

SEQ ID NO: 7215 - DNA, 25 bp, synthetic construct
  source 1..25: mol_type = other DNA; mol_type = other DNA
ctcctaagccagaggtgagacaccc

SEQ ID NO: 7216 - DNA, 25 bp, synthetic construct
  source 1..25: mol_type = other DNA; mol_type = other DNA
ctcctaagccagaggtgaaacaccc

SEQ ID NO: 7217 - DNA, 25 bp, synthetic construct
  source 1..25: mol_type = other DNA; mol_type = other DNA
ctcctaagccagaggtaaaacaccc

SEQ ID NO: 7218 - DNA, 25 bp, synthetic construct
  source 1..25: mol_type = other DNA; mol_type = other DNA
cctcctaagccagaggtgagacacc

SEQ ID NO: 7219 - DNA, 25 bp, synthetic construct
  source 1..25: mol_type = other DNA; mol_type = other DNA
cctcctaagccagaggtgaaacacc

SEQ ID NO: 7220 - DNA, 25 bp, synthetic construct
  source 1..25: mol_type = other DNA; mol_type = other DNA
cctcctaagccagaggtaaaacacc

SEQ ID NO: 7221 - DNA, 25 bp, synthetic construct
  source 1..25: mol_type = other DNA; mol_type = other DNA
tcctcctaagccagaggtgaaacac

SEQ ID NO: 7222 - DNA, 25 bp, synthetic construct
  source 1..25: mol_type = other DNA; mol_type = other DNA
tcctcctaagccagaggtaaaacac

SEQ ID NO: 7223 - DNA, 25 bp, synthetic construct
  source 1..25: mol_type = other DNA; mol_type = other DNA
ctcctcctaagccagaggtgagaca

SEQ ID NO: 7224 - DNA, 25 bp, synthetic construct
  source 1..25: mol_type = other DNA; mol_type = other DNA
ctcctcctaagccagaggtgaaaca

SEQ ID NO: 7225 - DNA, 25 bp, synthetic construct
  source 1..25: mol_type = other DNA; mol_type = other DNA
ctcctcctaagccagaggtaaaaca

SEQ ID NO: 7226 - DNA, 25 bp, synthetic construct
  source 1..25: mol_type = other DNA; mol_type = other DNA
cctcctcctaagccagaggtgagac

SEQ ID NO: 7227 - DNA, 25 bp, synthetic construct
  source 1..25: mol_type = other DNA; mol_type = other DNA
cctcctcctaagccagaggtgaaac

SEQ ID NO: 7228 - DNA, 25 bp, synthetic construct
  source 1..25: mol_type = other DNA; mol_type = other DNA
cctcctcctaagccagaggtaaaac

SEQ ID NO: 7229 - DNA, 25 bp, synthetic construct
  source 1..25: mol_type = other DNA; mol_type = other DNA
tcctcctcctaagccagaggtgaaa

SEQ ID NO: 7230 - DNA, 25 bp, synthetic construct
  source 1..25: mol_type = other DNA; mol_type = other DNA
tcctcctcctaagccagaggtaaaa

SEQ ID NO: 7231 - DNA, 25 bp, synthetic construct
  source 1..25: mol_type = other DNA; mol_type = other DNA
gtcctcctcctaagccagaggtgag

SEQ ID NO: 7232 - DNA, 25 bp, synthetic construct
  source 1..25: mol_type = other DNA; mol_type = other DNA
gtcctcctcctaagccagaggtgaa

SEQ ID NO: 7233 - DNA, 25 bp, synthetic construct
  source 1..25: mol_type = other DNA; mol_type = other DNA
gtcctcctcctaagccagaggtaaa

SEQ ID NO: 7234 - DNA, 25 bp, synthetic construct
  source 1..25: mol_type = other DNA; mol_type = other DNA
agtcctcctcctaagccagaggtga

SEQ ID NO: 7235 - DNA, 25 bp, synthetic construct
  source 1..25: mol_type = other DNA; mol_type = other DNA
agtcctcctcctaagccagaggtaa

SEQ ID NO: 7236 - DNA, 25 bp, synthetic construct
  source 1..25: mol_type = other DNA; mol_type = other DNA
agtcctcctcctaagccagagataa

SEQ ID NO: 7237 - DNA, 25 bp, synthetic construct
  source 1..25: mol_type = other DNA; mol_type = other DNA
cagtcctcctcctaagccagaggta

SEQ ID NO: 7238 - DNA, 25 bp, synthetic construct
  source 1..25: mol_type = other DNA; mol_type = other DNA
cagtcctcctcctaagccagagata

SEQ ID NO: 7239 - DNA, 25 bp, synthetic construct
  source 1..25: mol_type = other DNA; mol_type = other DNA
ccagtcctcctcctaagccagaggt

SEQ ID NO: 7240 - DNA, 25 bp, synthetic construct
  source 1..25: mol_type = other DNA; mol_type = other DNA
ccagtcctcctcctaagccagagat

SEQ ID NO: 7241 - DNA, 25 bp, synthetic construct
  source 1..25: mol_type = other DNA; mol_type = other DNA
ccagtcctcctcctaagccagaaat

SEQ ID NO: 7242 - DNA, 25 bp, synthetic construct
  source 1..25: mol_type = other DNA; mol_type = other DNA
cccagtcctcctcctaagccagagg

SEQ ID NO: 7243 - DNA, 25 bp, synthetic construct
  source 1..25: mol_type = other DNA; mol_type = other DNA
cccagtcctcctcctaagccagaga

SEQ ID NO: 7244 - DNA, 25 bp, synthetic construct
  source 1..25: mol_type = other DNA; mol_type = other DNA
cccagtcctcctcctaagccagaaa

SEQ ID NO: 7245 - DNA, 25 bp, synthetic construct
  source 1..25: mol_type = other DNA; mol_type = other DNA
ccccagtcctcctcctaagccagaa

SEQ ID NO: 7246 - DNA, 25 bp, synthetic construct
  source 1..25: mol_type = other DNA; mol_type = other DNA
ccccagtcctcctcctaagccaaaa

SEQ ID NO: 7247 - DNA, 25 bp, synthetic construct
  source 1..25: mol_type = other DNA; mol_type = other DNA
cccccagtcctcctcctaagccaga

SEQ ID NO: 7248 - DNA, 25 bp, synthetic construct
  source 1..25: mol_type = other DNA; mol_type = other DNA
cccccagtcctcctcctaagccaaa

SEQ ID NO: 7249 - DNA, 25 bp, synthetic construct
  source 1..25: mol_type = other DNA; mol_type = other DNA
cccccagtcctcctcctaaaccaaa

SEQ ID NO: 7250 - DNA, 25 bp, synthetic construct
  source 1..25: mol_type = other DNA; mol_type = other DNA
gcccccagtcctcctcctaagccag

SEQ ID NO: 7251 - DNA, 25 bp, synthetic construct
  source 1..25: mol_type = other DNA; mol_type = other DNA
gcccccagtcctcctcctaagccaa

SEQ ID NO: 7252 - DNA, 25 bp, synthetic construct
  source 1..25: mol_type = other DNA; mol_type = other DNA
gcccccagtcctcctcctaaaccaa

SEQ ID NO: 7253 - DNA, 25 bp, synthetic construct
  source 1..25: mol_type = other DNA; mol_type = other DNA
ggcccccagtcctcctcctaaacca

SEQ ID NO: 7254 - DNA, 25 bp, synthetic construct
  source 1..25: mol_type = other DNA; mol_type = other DNA
ggcccccaatcctcctcctaaacca

SEQ ID NO: 7255 - DNA, 25 bp, synthetic construct
  source 1..25: mol_type = other DNA; mol_type = other DNA
gggcccccagtcctcctcctaagcc

SEQ ID NO: 7256 - DNA, 25 bp, synthetic construct
  source 1..25: mol_type = other DNA; mol_type = other DNA
gggcccccagtcctcctcctaaacc

SEQ ID NO: 7257 - DNA, 25 bp, synthetic construct
  source 1..25: mol_type = other DNA; mol_type = other DNA
gggcccccaatcctcctcctaaacc

SEQ ID NO: 7258 - DNA, 25 bp, synthetic construct
  source 1..25: mol_type = other DNA; mol_type = other DNA
agggcccccagtcctcctcctaagc

SEQ ID NO: 7259 - DNA, 25 bp, synthetic construct
  source 1..25: mol_type = other DNA; mol_type = other DNA
gaggcccccagtcctcctcctaagc

SEQ ID NO: 7260 - DNA, 25 bp, synthetic construct
  source 1..25: mol_type = other DNA; mol_type = other DNA
ggagcccccagtcctcctcctaagc

SEQ ID NO: 7261 - DNA, 25 bp, synthetic construct
  source 1..25: mol_type = other DNA; mol_type = other DNA
gggacccccagtcctcctcctaagc

SEQ ID NO: 7262 - DNA, 25 bp, synthetic construct
  source 1..25: mol_type = other DNA; mol_type = other DNA
gagggcccccagtcctcctcctaag

SEQ ID NO: 7263 - DNA, 25 bp, synthetic construct
  source 1..25: mol_type = other DNA; mol_type = other DNA
ggaggcccccagtcctcctcctaag

SEQ ID NO: 7264 - DNA, 25 bp, synthetic construct
  source 1..25: mol_type = other DNA; mol_type = other DNA
gggagcccccagtcctcctcctaag

SEQ ID NO: 7265 - DNA, 25 bp, synthetic construct
  source 1..25: mol_type = other DNA; mol_type = other DNA
tgagggcccccagtcctcctcctaa

SEQ ID NO: 7266 - DNA, 25 bp, synthetic construct
  source 1..25: mol_type = other DNA; mol_type = other DNA
tggaggcccccagtcctcctcctaa

SEQ ID NO: 7267 - DNA, 25 bp, synthetic construct
  source 1..25: mol_type = other DNA; mol_type = other DNA
tgggagcccccagtcctcctcctaa

SEQ ID NO: 7268 - DNA, 25 bp, synthetic construct
  source 1..25: mol_type = other DNA; mol_type = other DNA
ctgagggcccccagtcctcctccta

SEQ ID NO: 7269 - DNA, 25 bp, synthetic construct
  source 1..25: mol_type = other DNA; mol_type = other DNA
ctggaggcccccagtcctcctccta

SEQ ID NO: 7270 - DNA, 25 bp, synthetic construct
  source 1..25: mol_type = other DNA; mol_type = other DNA
ctgggagcccccagtcctcctccta

SEQ ID NO: 7271 - DNA, 25 bp, synthetic construct
  source 1..25: mol_type = other DNA; mol_type = other DNA
actgagggcccccagtcctcctcct

SEQ ID NO: 7272 - DNA, 25 bp, synthetic construct
  source 1..25: mol_type = other DNA; mol_type = other DNA
actggaggcccccagtcctcctcct

SEQ ID NO: 7273 - DNA, 25 bp, synthetic construct
  source 1..25: mol_type = other DNA; mol_type = other DNA
actgggagcccccagtcctcctcct

SEQ ID NO: 7274 - DNA, 25 bp, synthetic construct
  source 1..25: mol_type = other DNA; mol_type = other DNA
cactgagggcccccagtcctcctcc

SEQ ID NO: 7275 - DNA, 25 bp, synthetic construct
  source 1..25: mol_type = other DNA; mol_type = other DNA
cactggaggcccccagtcctcctcc

SEQ ID NO: 7276 - DNA, 25 bp, synthetic construct
  source 1..25: mol_type = other DNA; mol_type = other DNA
cactgggagcccccagtcctcctcc

SEQ ID NO: 7277 - DNA, 25 bp, synthetic construct
  source 1..25: mol_type = other DNA; mol_type = other DNA
gcactgagggcccccagtcctcctc

SEQ ID NO: 7278 - DNA, 25 bp, synthetic construct
  source 1..25: mol_type = other DNA; mol_type = other DNA
gcactggaggcccccagtcctcctc

SEQ ID NO: 7279 - DNA, 25 bp, synthetic construct
  source 1..25: mol_type = other DNA; mol_type = other DNA
gcactgggagcccccagtcctcctc

SEQ ID NO: 7280 - DNA, 25 bp, synthetic construct
  source 1..25: mol_type = other DNA; mol_type = other DNA
ggcactgagggcccccagtcctcct

SEQ ID NO: 7281 - DNA, 25 bp, synthetic construct
  source 1..25: mol_type = other DNA; mol_type = other DNA
ggcactggaggcccccagtcctcct

SEQ ID NO: 7282 - DNA, 25 bp, synthetic construct
  source 1..25: mol_type = other DNA; mol_type = other DNA
ggcactgggagcccccagtcctcct

SEQ ID NO: 7283 - DNA, 25 bp, synthetic construct
  source 1..25: mol_type = other DNA; mol_type = other DNA
gggcactgagggcccccagtcctcc

SEQ ID NO: 7284 - DNA, 25 bp, synthetic construct
  source 1..25: mol_type = other DNA; mol_type = other DNA
gggcactggaggcccccagtcctcc

SEQ ID NO: 7285 - DNA, 25 bp, synthetic construct
  source 1..25: mol_type = other DNA; mol_type = other DNA
gggcactgggagcccccagtcctcc

SEQ ID NO: 7286 - DNA, 25 bp, synthetic construct
  source 1..25: mol_type = other DNA; mol_type = other DNA
agggcactgagggcccccagtcctc

SEQ ID NO: 7287 - DNA, 25 bp, synthetic construct
  source 1..25: mol_type = other DNA; mol_type = other DNA
agggcactggaggcccccagtcctc

SEQ ID NO: 7288 - DNA, 25 bp, synthetic construct
  source 1..25: mol_type = other DNA; mol_type = other DNA
agggcactgggagcccccagtcctc

SEQ ID NO: 7289 - DNA, 25 bp, synthetic construct
  source 1..25: mol_type = other DNA; mol_type = other DNA
cagggcactgagggcccccagtcct

SEQ ID NO: 7290 - DNA, 25 bp, synthetic construct
  source 1..25: mol_type = other DNA; mol_type = other DNA
cagggcactggaggcccccagtcct

SEQ ID NO: 7291 - DNA, 25 bp, synthetic construct
  source 1..25: mol_type = other DNA; mol_type = other DNA
cagggcactgggagcccccagtcct

SEQ ID NO: 7292 - DNA, 25 bp, synthetic construct
  source 1..25: mol_type = other DNA; mol_type = other DNA
ccagggcactgtgggcccccagtcc

SEQ ID NO: 7293 - DNA, 25 bp, synthetic construct
  source 1..25: mol_type = other DNA; mol_type = other DNA
ccagggcactggtggcccccagtcc

SEQ ID NO: 7294 - DNA, 25 bp, synthetic construct
  source 1..25: mol_type = other DNA; mol_type = other DNA
ccagggcactgggtgcccccagtcc

SEQ ID NO: 7295 - DNA, 25 bp, synthetic construct
  source 1..25: mol_type = other DNA; mol_type = other DNA
tccagggcactgagggcccccagtc

SEQ ID NO: 7296 - DNA, 25 bp, synthetic construct
  source 1..25: mol_type = other DNA; mol_type = other DNA
tccagggcactggaggcccccagtc

SEQ ID NO: 7297 - DNA, 25 bp, synthetic construct
  source 1..25: mol_type = other DNA; mol_type = other DNA
tccagggcactgggagcccccagtc

SEQ ID NO: 7298 - DNA, 25 bp, synthetic construct
  source 1..25: mol_type = other DNA; mol_type = other DNA
ttccagggcactgagggcccccagt

SEQ ID NO: 7299 - DNA, 25 bp, synthetic construct
  source 1..25: mol_type = other DNA; mol_type = other DNA
ttccagggcactggaggcccccagt

SEQ ID NO: 7300 - DNA, 25 bp, synthetic construct
  source 1..25: mol_type = other DNA; mol_type = other DNA
ttccagggcactgggagcccccagt

SEQ ID NO: 7301 - DNA, 25 bp, synthetic construct
  source 1..25: mol_type = other DNA; mol_type = other DNA
gttccagggcactgagggcccccag

SEQ ID NO: 7302 - DNA, 25 bp, synthetic construct
  source 1..25: mol_type = other DNA; mol_type = other DNA
gttccagggcactggaggcccccag

SEQ ID NO: 7303 - DNA, 25 bp, synthetic construct
  source 1..25: mol_type = other DNA; mol_type = other DNA
gttccagggcactgggagcccccag

SEQ ID NO: 7304 - DNA, 25 bp, synthetic construct
  source 1..25: mol_type = other DNA; mol_type = other DNA
ggttccagggcactgagggccccca

SEQ ID NO: 7305 - DNA, 25 bp, synthetic construct
  source 1..25: mol_type = other DNA; mol_type = other DNA
ggttccagggcactggaggccccca

SEQ ID NO: 7306 - DNA, 25 bp, synthetic construct
  source 1..25: mol_type = other DNA; mol_type = other DNA
ggttccagggcactgggagccccca

SEQ ID NO: 7307 - DNA, 25 bp, synthetic construct
  source 1..25: mol_type = other DNA; mol_type = other DNA
aggttccagggcactgagggccccc

SEQ ID NO: 7308 - DNA, 25 bp, synthetic construct
  source 1..25: mol_type = other DNA; mol_type = other DNA
aggttccagggcactggaggccccc

SEQ ID NO: 7309 - DNA, 25 bp, synthetic construct
  source 1..25: mol_type = other DNA; mol_type = other DNA
aggttccagggcactgggagccccc

SEQ ID NO: 7310 - DNA, 25 bp, synthetic construct
  source 1..25: mol_type = other DNA; mol_type = other DNA
gaggttccagggcactgagggcccc

SEQ ID NO: 7311 - DNA, 25 bp, synthetic construct
  source 1..25: mol_type = other DNA; mol_type = other DNA
gaggttccagggcactggaggcccc

SEQ ID NO: 7312 - DNA, 25 bp, synthetic construct
  source 1..25: mol_type = other DNA; mol_type = other DNA
gaggttccagggcactgggagcccc

SEQ ID NO: 7313 - DNA, 25 bp, synthetic construct
  source 1..25: mol_type = other DNA; mol_type = other DNA
gaggttccagggcactgggaacccc

SEQ ID NO: 7314 - DNA, 25 bp, synthetic construct
  source 1..25: mol_type = other DNA; mol_type = other DNA
ggaggttccagggcactgagggccc

SEQ ID NO: 7315 - DNA, 25 bp, synthetic construct
  source 1..25: mol_type = other DNA; mol_type = other DNA
ggaggttccagggcactggaggccc

SEQ ID NO: 7316 - DNA, 25 bp, synthetic construct
  source 1..25: mol_type = other DNA; mol_type = other DNA
ggaggttccagggcactgggagccc

SEQ ID NO: 7317 - DNA, 25 bp, synthetic construct
  source 1..25: mol_type = other DNA; mol_type = other DNA
ggaggttccagggcactgggaaccc

SEQ ID NO: 7318 - DNA, 25 bp, synthetic construct
  source 1..25: mol_type = other DNA; mol_type = other DNA
tggaggttccagggcactgagggcc

SEQ ID NO: 7319 - DNA, 25 bp, synthetic construct
  source 1..25: mol_type = other DNA; mol_type = other DNA
tggaggttccagggcactggaggcc

SEQ ID NO: 7320 - DNA, 25 bp, synthetic construct
  source 1..25: mol_type = other DNA; mol_type = other DNA
tggaggttccagggcactgggagcc

SEQ ID NO: 7321 - DNA, 25 bp, synthetic construct
  source 1..25: mol_type = other DNA; mol_type = other DNA
tggaggttccagggcactgggaacc

SEQ ID NO: 7322 - DNA, 25 bp, synthetic construct
  source 1..25: mol_type = other DNA; mol_type = other DNA
atggaggttccagggcactgagggc

SEQ ID NO: 7323 - DNA, 25 bp, synthetic construct
  source 1..25: mol_type = other DNA; mol_type = other DNA
atggaggttccagggcactggaggc

SEQ ID NO: 7324 - DNA, 25 bp, synthetic construct
  source 1..25: mol_type = other DNA; mol_type = other DNA
atggaggttccagggcactgggagc

SEQ ID NO: 7325 - DNA, 25 bp, synthetic construct
  source 1..25: mol_type = other DNA; mol_type = other DNA
atggaggttccagggcactgggaac

SEQ ID NO: 7326 - DNA, 25 bp, synthetic construct
  source 1..25: mol_type = other DNA; mol_type = other DNA
tatggaggttccagggcactgaggg

SEQ ID NO: 7327 - DNA, 25 bp, synthetic construct
  source 1..25: mol_type = other DNA; mol_type = other DNA
tatggaggttccagggcactggagg

SEQ ID NO: 7328 - DNA, 25 bp, synthetic construct
  source 1..25: mol_type = other DNA; mol_type = other DNA
tatggaggttccagggcactgggag

SEQ ID NO: 7329 - DNA, 25 bp, synthetic construct
  source 1..25: mol_type = other DNA; mol_type = other DNA
tatggaggttccagggcactgggaa

SEQ ID NO: 7330 - DNA, 25 bp, synthetic construct
  source 1..25: mol_type = other DNA; mol_type = other DNA
atatggaggttccagggcactggga

SEQ ID NO: 7331 - DNA, 25 bp, synthetic construct
  source 1..25: mol_type = other DNA; mol_type = other DNA
atatggaggttccagggcactggaa

SEQ ID NO: 7332 - DNA, 25 bp, synthetic construct
  source 1..25: mol_type = other DNA; mol_type = other DNA
aatatggaggttccagggcactggg

SEQ ID NO: 7333 - DNA, 25 bp, synthetic construct
  source 1..25: mol_type = other DNA; mol_type = other DNA
aatatggaggttccagggcactgga

SEQ ID NO: 7334 - DNA, 25 bp, synthetic construct
  source 1..25: mol_type = other DNA; mol_type = other DNA
aatatggaggttccagggcactgaa

SEQ ID NO: 7335 - DNA, 25 bp, synthetic construct
  source 1..25: mol_type = other DNA; mol_type = other DNA
gaatatggaggttccagggcactgg

SEQ ID NO: 7336 - DNA, 25 bp, synthetic construct
  source 1..25: mol_type = other DNA; mol_type = other DNA
gaatatggaggttccagggcactga

SEQ ID NO: 7337 - DNA, 25 bp, synthetic construct
  source 1..25: mol_type = other DNA; mol_type = other DNA
gaatatggaggttccagggcactaa

SEQ ID NO: 7338 - DNA, 25 bp, synthetic construct
  source 1..25: mol_type = other DNA; mol_type = other DNA
ggaatatggaggttccagggcacta

SEQ ID NO: 7339 - DNA, 25 bp, synthetic construct
  source 1..25: mol_type = other DNA; mol_type = other DNA
ggaatatggaggttccaggacacta

SEQ ID NO: 7340 - DNA, 25 bp, synthetic construct
  source 1..25: mol_type = other DNA; mol_type = other DNA
gggaatatggaggttccagggcact

SEQ ID NO: 7341 - DNA, 25 bp, synthetic construct
  source 1..25: mol_type = other DNA; mol_type = other DNA
gggaatatggaggttccaggacact

SEQ ID NO: 7342 - DNA, 25 bp, synthetic construct
  source 1..25: mol_type = other DNA; mol_type = other DNA
gggaatatggaggttccagaacact

SEQ ID NO: 7343 - DNA, 25 bp, synthetic construct
  source 1..25: mol_type = other DNA; mol_type = other DNA
tgggaatatggaggttccagggcac

SEQ ID NO: 7344 - DNA, 25 bp, synthetic construct
  source 1..25: mol_type = other DNA; mol_type = other DNA
gtggaatatggaggttccagggcac

SEQ ID NO: 7345 - DNA, 25 bp, synthetic construct
  source 1..25: mol_type = other DNA; mol_type = other DNA
ggtgaatatggaggttccagggcac

SEQ ID NO: 7346 - DNA, 25 bp, synthetic construct
  source 1..25: mol_type = other DNA; mol_type = other DNA
gggtaatatggaggttccagggcac

SEQ ID NO: 7347 - DNA, 25 bp, synthetic construct
  source 1..25: mol_type = other DNA; mol_type = other DNA
atgggaatatggaggttccagggca

SEQ ID NO: 7348 - DNA, 25 bp, synthetic construct
  source 1..25: mol_type = other DNA; mol_type = other DNA
agtggaatatggaggttccagggca

SEQ ID NO: 7349 - DNA, 25 bp, synthetic construct
  source 1..25: mol_type = other DNA; mol_type = other DNA
aggtgaatatggaggttccagggca

SEQ ID NO: 7350 - DNA, 25 bp, synthetic construct
  source 1..25: mol_type = other DNA; mol_type = other DNA
agggtaatatggaggttccagggca

SEQ ID NO: 7351 - DNA, 25 bp, synthetic construct
  source 1..25: mol_type = other DNA; mol_type = other DNA
gatgggaatatggaggttccagggc

SEQ ID NO: 7352 - DNA, 25 bp, synthetic construct
  source 1..25: mol_type = other DNA; mol_type = other DNA
gagtggaatatggaggttccagggc

SEQ ID NO: 7353 - DNA, 25 bp, synthetic construct
  source 1..25: mol_type = other DNA; mol_type = other DNA
gaggtgaatatggaggttccagggc

SEQ ID NO: 7354 - DNA, 25 bp, synthetic construct
  source 1..25: mol_type = other DNA; mol_type = other DNA
gagggtaatatggaggttccagggc

SEQ ID NO: 7355 - DNA, 25 bp, synthetic construct
  source 1..25: mol_type = other DNA; mol_type = other DNA
ggatgggaatatggaggttccaggg

SEQ ID NO: 7356 - DNA, 25 bp, synthetic construct
  source 1..25: mol_type = other DNA; mol_type = other DNA
ggagtggaatatggaggttccaggg

SEQ ID NO: 7357 - DNA, 25 bp, synthetic construct
  source 1..25: mol_type = other DNA; mol_type = other DNA
ggaggtgaatatggaggttccaggg

SEQ ID NO: 7358 - DNA, 25 bp, synthetic construct
  source 1..25: mol_type = other DNA; mol_type = other DNA
ggagggtaatatggaggttccaggg

SEQ ID NO: 7359 - DNA, 25 bp, synthetic construct
  source 1..25: mol_type = other DNA; mol_type = other DNA
gggatgggaatatggaggttccagg

SEQ ID NO: 7360 - DNA, 25 bp, synthetic construct
  source 1..25: mol_type = other DNA; mol_type = other DNA
gggagtggaatatggaggttccagg

SEQ ID NO: 7361 - DNA, 25 bp, synthetic construct
  source 1..25: mol_type = other DNA; mol_type = other DNA
gggaggtgaatatggaggttccagg

SEQ ID NO: 7362 - DNA, 25 bp, synthetic construct
  source 1..25: mol_type = other DNA; mol_type = other DNA
gggagggtaatatggaggttccagg

SEQ ID NO: 7363 - DNA, 25 bp, synthetic construct
  source 1..25: mol_type = other DNA; mol_type = other DNA
agggatgggaatatggaggttccag

SEQ ID NO: 7364 - DNA, 25 bp, synthetic construct
  source 1..25: mol_type = other DNA; mol_type = other DNA
agggagtggaatatggaggttccag

SEQ ID NO: 7365 - DNA, 25 bp, synthetic construct
  source 1..25: mol_type = other DNA; mol_type = other DNA
agggaggtgaatatggaggttccag

SEQ ID NO: 7366 - DNA, 25 bp, synthetic construct
  source 1..25: mol_type = other DNA; mol_type = other DNA
agggagggtaatatggaggttccag

SEQ ID NO: 7367 - DNA, 25 bp, synthetic construct
  source 1..25: mol_type = other DNA; mol_type = other DNA
cagggatgggaatatggaggttcca

SEQ ID NO: 7368 - DNA, 25 bp, synthetic construct
  source 1..25: mol_type = other DNA; mol_type = other DNA
cagggagtggaatatggaggttcca

SEQ ID NO: 7369 - DNA, 25 bp, synthetic construct
  source 1..25: mol_type = other DNA; mol_type = other DNA
cagggaggtgaatatggaggttcca

SEQ ID NO: 7370 - DNA, 25 bp, synthetic construct
  source 1..25: mol_type = other DNA; mol_type = other DNA
cagggagggtaatatggaggttcca

SEQ ID NO: 7371 - DNA, 25 bp, synthetic construct
  source 1..25: mol_type = other DNA; mol_type = other DNA
tcagggatgggaatatggaggttcc

SEQ ID NO: 7372 - DNA, 25 bp, synthetic construct
  source 1..25: mol_type = other DNA; mol_type = other DNA
tcagggagtggaatatggaggttcc

SEQ ID NO: 7373 - DNA, 25 bp, synthetic construct
  source 1..25: mol_type = other DNA; mol_type = other DNA
tcagggaggtgaatatggaggttcc

SEQ ID NO: 7374 - DNA, 25 bp, synthetic construct
  source 1..25: mol_type = other DNA; mol_type = other DNA
tcagggagggtaatatggaggttcc

SEQ ID NO: 7375 - DNA, 25 bp, synthetic construct
  source 1..25: mol_type = other DNA; mol_type = other DNA
gtcagggatgggaatatggaggttc

SEQ ID NO: 7376 - DNA, 25 bp, synthetic construct
  source 1..25: mol_type = other DNA; mol_type = other DNA
gtcagggagtggaatatggaggttc

SEQ ID NO: 7377 - DNA, 25 bp, synthetic construct
  source 1..25: mol_type = other DNA; mol_type = other DNA
gtcagggaggtgaatatggaggttc

SEQ ID NO: 7378 - DNA, 25 bp, synthetic construct
  source 1..25: mol_type = other DNA; mol_type = other DNA
gtcagggagggtaatatggaggttc

SEQ ID NO: 7379 - DNA, 25 bp, synthetic construct
  source 1..25: mol_type = other DNA; mol_type = other DNA
ggtcagggatgggaatatggaggtt

SEQ ID NO: 7380 - DNA, 25 bp, synthetic construct
  source 1..25: mol_type = other DNA; mol_type = other DNA
ggtcagggagtggaatatggaggtt

SEQ ID NO: 7381 - DNA, 25 bp, synthetic construct
  source 1..25: mol_type = other DNA; mol_type = other DNA
ggtcagggaggtgaatatggaggtt

SEQ ID NO: 7382 - DNA, 25 bp, synthetic construct
  source 1..25: mol_type = other DNA; mol_type = other DNA
ggtcagggagggtaatatggaggtt

SEQ ID NO: 7383 - DNA, 25 bp, synthetic construct
  source 1..25: mol_type = other DNA; mol_type = other DNA
gggtcagggatgggaatatggaggt

SEQ ID NO: 7384 - DNA, 25 bp, synthetic construct
  source 1..25: mol_type = other DNA; mol_type = other DNA
gggtcagggagtggaatatggaggt

SEQ ID NO: 7385 - DNA, 25 bp, synthetic construct
  source 1..25: mol_type = other DNA; mol_type = other DNA
gggtcagggaggtgaatatggaggt

SEQ ID NO: 7386 - DNA, 25 bp, synthetic construct
  source 1..25: mol_type = other DNA; mol_type = other DNA
gggtcagggagggtaatatggaggt

SEQ ID NO: 7387 - DNA, 25 bp, synthetic construct
  source 1..25: mol_type = other DNA; mol_type = other DNA
gtggaggtcagggagaggaatatgg

SEQ ID NO: 7388 - DNA, 25 bp, synthetic construct
  source 1..25: mol_type = other DNA; mol_type = other DNA
gtggaggtcagggaggagaatatgg

SEQ ID NO: 7389 - DNA, 25 bp, synthetic construct
  source 1..25: mol_type = other DNA; mol_type = other DNA
tgtggaggtcagggagaggaatatg

SEQ ID NO: 7390 - DNA, 25 bp, synthetic construct
  source 1..25: mol_type = other DNA; mol_type = other DNA
ctgtggaggtcagggagggaaatat

SEQ ID NO: 7391 - DNA, 25 bp, synthetic construct
  source 1..25: mol_type = other DNA; mol_type = other DNA
gaacgcgtgtccttgttcagctgct

SEQ ID NO: 7392 - DNA, 25 bp, synthetic construct
  source 1..25: mol_type = other DNA; mol_type = other DNA
gaacgcgtgtccttgttcagctact

SEQ ID NO: 7393 - DNA, 25 bp, synthetic construct
  source 1..25: mol_type = other DNA; mol_type = other DNA
gaacgcgtgtccttgttcaactact

SEQ ID NO: 7394 - DNA, 25 bp, synthetic construct
  source 1..25: mol_type = other DNA; mol_type = other DNA
ggaacgcgtgtccttgttcagctgc

SEQ ID NO: 7395 - DNA, 25 bp, synthetic construct
  source 1..25: mol_type = other DNA; mol_type = other DNA
ggaacgcgtgtccttgttcagctac

SEQ ID NO: 7396 - DNA, 25 bp, synthetic construct
  source 1..25: mol_type = other DNA; mol_type = other DNA
ggaacgcgtgtccttgttcaactac

SEQ ID NO: 7397 - DNA, 25 bp, synthetic construct
  source 1..25: mol_type = other DNA; mol_type = other DNA
gggaacgcgtgtccttgttcagcta

SEQ ID NO: 7398 - DNA, 25 bp, synthetic construct
  source 1..25: mol_type = other DNA; mol_type = other DNA
gggaacgcgtgtccttgttcaacta

SEQ ID NO: 7399 - DNA, 25 bp, synthetic construct
  source 1..25: mol_type = other DNA; mol_type = other DNA
agggaacgcgtgtccttgttcagct

SEQ ID NO: 7400 - DNA, 25 bp, synthetic construct
  source 1..25: mol_type = other DNA; mol_type = other DNA
agggaacgcgtgtccttgttcaact

SEQ ID NO: 7401 - DNA, 25 bp, synthetic construct
  source 1..25: mol_type = other DNA; mol_type = other DNA
agggaacgcgtgtccttattcaact

SEQ ID NO: 7402 - DNA, 25 bp, synthetic construct
  source 1..25: mol_type = other DNA; mol_type = other DNA
cagggaacgcgtgtccttgttcagc

SEQ ID NO: 7403 - DNA, 25 bp, synthetic construct
  source 1..25: mol_type = other DNA; mol_type = other DNA
cagggaacgcgtgtccttgttcaac

SEQ ID NO: 7404 - DNA, 25 bp, synthetic construct
  source 1..25: mol_type = other DNA; mol_type = other DNA
cagggaacgcgtgtccttattcaac

SEQ ID NO: 7405 - DNA, 25 bp, synthetic construct
  source 1..25: mol_type = other DNA; mol_type = other DNA
ccagggaacgcgtgtccttgttcaa

SEQ ID NO: 7406 - DNA, 25 bp, synthetic construct
  source 1..25: mol_type = other DNA; mol_type = other DNA
ccagggaacgcgtgtccttattcaa

SEQ ID NO: 7407 - DNA, 25 bp, synthetic construct
  source 1..25: mol_type = other DNA; mol_type = other DNA
cccagggaacgcgtgtccttgttca

SEQ ID NO: 7408 - DNA, 25 bp, synthetic construct
  source 1..25: mol_type = other DNA; mol_type = other DNA
cccagggaacgcgtgtccttattca

SEQ ID NO: 7409 - DNA, 25 bp, synthetic construct
  source 1..25: mol_type = other DNA; mol_type = other DNA
cccagggaacgcgtatccttattca

SEQ ID NO: 7410 - DNA, 25 bp, synthetic construct
  source 1..25: mol_type = other DNA; mol_type = other DNA
ccccagggaacgcgtgtccttgttc

SEQ ID NO: 7411 - DNA, 25 bp, synthetic construct
  source 1..25: mol_type = other DNA; mol_type = other DNA
ccccagggaacgcgtgtccttattc

SEQ ID NO: 7412 - DNA, 25 bp, synthetic construct
  source 1..25: mol_type = other DNA; mol_type = other DNA
ccccagggaacgcgtatccttattc

SEQ ID NO: 7413 - DNA, 25 bp, synthetic construct
  source 1..25: mol_type = other DNA; mol_type = other DNA
cccccagggaacgcgtgtccttatt

SEQ ID NO: 7414 - DNA, 25 bp, synthetic construct
  source 1..25: mol_type = other DNA; mol_type = other DNA
cccccagggaacgcgtatccttatt

SEQ ID NO: 7415 - DNA, 25 bp, synthetic construct
  source 1..25: mol_type = other DNA; mol_type = other DNA
tcccccagggaacgcgtgtccttgt

SEQ ID NO: 7416 - DNA, 25 bp, synthetic construct
  source 1..25: mol_type = other DNA; mol_type = other DNA
tcccccagggaacgcgtgtccttat

SEQ ID NO: 7417 - DNA, 25 bp, synthetic construct
  source 1..25: mol_type = other DNA; mol_type = other DNA
tcccccagggaacgcgtatccttat

SEQ ID NO: 7418 - DNA, 25 bp, synthetic construct
  source 1..25: mol_type = other DNA; mol_type = other DNA
ctcccccagggaacgcgtgtccttg

SEQ ID NO: 7419 - DNA, 25 bp, synthetic construct
  source 1..25: mol_type = other DNA; mol_type = other DNA
ctcccccagggaacgcgtgtcctta

SEQ ID NO: 7420 - DNA, 25 bp, synthetic construct
  source 1..25: mol_type = other DNA; mol_type = other DNA
ctcccccagggaacgcgtatcctta

SEQ ID NO: 7421 - DNA, 25 bp, synthetic construct
  source 1..25: mol_type = other DNA; mol_type = other DNA
cctcccccagggaacgcgtatcctt

SEQ ID NO: 7422 - DNA, 25 bp, synthetic construct
  source 1..25: mol_type = other DNA; mol_type = other DNA
cctcccccagggaacgcatatcctt

SEQ ID NO: 7423 - DNA, 25 bp, synthetic construct
  source 1..25: mol_type = other DNA; mol_type = other DNA
tcctcccccagggaacgcgtgtcct

SEQ ID NO: 7424 - DNA, 25 bp, synthetic construct
  source 1..25: mol_type = other DNA; mol_type = other DNA
tcctcccccagggaacgcgtatcct

SEQ ID NO: 7425 - DNA, 25 bp, synthetic construct
  source 1..25: mol_type = other DNA; mol_type = other DNA
tcctcccccagggaacgcatatcct

SEQ ID NO: 7426 - DNA, 25 bp, synthetic construct
  source 1..25: mol_type = other DNA; mol_type = other DNA
ttcctcccccagggaacgcgtgtcc

SEQ ID NO: 7427 - DNA, 25 bp, synthetic construct
  source 1..25: mol_type = other DNA; mol_type = other DNA
ttcctcccccagggaacgcgtatcc

SEQ ID NO: 7428 - DNA, 25 bp, synthetic construct
  source 1..25: mol_type = other DNA; mol_type = other DNA
ttcctcccccagggaacgcatatcc

SEQ ID NO: 7429 - DNA, 25 bp, synthetic construct
  source 1..25: mol_type = other DNA; mol_type = other DNA
gttcctcccccagggaacgcgtatc

SEQ ID NO: 7430 - DNA, 25 bp, synthetic construct
  source 1..25: mol_type = other DNA; mol_type = other DNA
gttcctcccccagggaacgcatatc

SEQ ID NO: 7431 - DNA, 25 bp, synthetic construct
  source 1..25: mol_type = other DNA; mol_type = other DNA
ggttcctcccccagggaacgcgtgt

SEQ ID NO: 7432 - DNA, 25 bp, synthetic construct
  source 1..25: mol_type = other DNA; mol_type = other DNA
ggttcctcccccagggaacgcgtat

SEQ ID NO: 7433 - DNA, 25 bp, synthetic construct
  source 1..25: mol_type = other DNA; mol_type = other DNA
ggttcctcccccagggaacgcatat

SEQ ID NO: 7434 - DNA, 25 bp, synthetic construct
  source 1..25: mol_type = other DNA; mol_type = other DNA
tggttcctcccccagggaacgcgtg

SEQ ID NO: 7435 - DNA, 25 bp, synthetic construct
  source 1..25: mol_type = other DNA; mol_type = other DNA
tggttcctcccccagggaacgcgta

SEQ ID NO: 7436 - DNA, 25 bp, synthetic construct
  source 1..25: mol_type = other DNA; mol_type = other DNA
tggttcctcccccagggaacgcata

SEQ ID NO: 7437 - DNA, 25 bp, synthetic construct
  source 1..25: mol_type = other DNA; mol_type = other DNA
ctggttcctcccccagggaacgcat

SEQ ID NO: 7438 - DNA, 25 bp, synthetic construct
  source 1..25: mol_type = other DNA; mol_type = other DNA
ctggttcctcccccagggaacacat

SEQ ID NO: 7439 - DNA, 25 bp, synthetic construct
  source 1..25: mol_type = other DNA; mol_type = other DNA
actggttcctcccccagggaacgcg

SEQ ID NO: 7440 - DNA, 25 bp, synthetic construct
  source 1..25: mol_type = other DNA; mol_type = other DNA
actggttcctcccccagggaacgca

SEQ ID NO: 7441 - DNA, 25 bp, synthetic construct
  source 1..25: mol_type = other DNA; mol_type = other DNA
actggttcctcccccagggaacaca

SEQ ID NO: 7442 - DNA, 25 bp, synthetic construct
  source 1..25: mol_type = other DNA; mol_type = other DNA
aactggttcctcccccagggaacgc

SEQ ID NO: 7443 - DNA, 25 bp, synthetic construct
  source 1..25: mol_type = other DNA; mol_type = other DNA
aactggttcctcccccagggaacac

SEQ ID NO: 7444 - DNA, 25 bp, synthetic construct
  source 1..25: mol_type = other DNA; mol_type = other DNA
aactggttcctcccccaggaaacac

SEQ ID NO: 7445 - DNA, 25 bp, synthetic construct
  source 1..25: mol_type = other DNA; mol_type = other DNA
caactggttcctcccccagggaaca

SEQ ID NO: 7446 - DNA, 25 bp, synthetic construct
  source 1..25: mol_type = other DNA; mol_type = other DNA
caactggttcctcccccaggaaaca

SEQ ID NO: 7447 - DNA, 25 bp, synthetic construct
  source 1..25: mol_type = other DNA; mol_type = other DNA
ccaactggttcctcccccagggaac

SEQ ID NO: 7448 - DNA, 25 bp, synthetic construct
  source 1..25: mol_type = other DNA; mol_type = other DNA
ccaactggttcctcccccaggaaac

SEQ ID NO: 7449 - DNA, 25 bp, synthetic construct
  source 1..25: mol_type = other DNA; mol_type = other DNA
ccaactggttcctcccccagaaaac

SEQ ID NO: 7450 - DNA, 25 bp, synthetic construct
  source 1..25: mol_type = other DNA; mol_type = other DNA
accaactggttcctcccccagggaa

SEQ ID NO: 7451 - DNA, 25 bp, synthetic construct
  source 1..25: mol_type = other DNA; mol_type = other DNA
accaactggttcctcccccaggaaa

SEQ ID NO: 7452 - DNA, 25 bp, synthetic construct
  source 1..25: mol_type = other DNA; mol_type = other DNA
accaactggttcctcccccagaaaa

SEQ ID NO: 7453 - DNA, 25 bp, synthetic construct
  source 1..25: mol_type = other DNA; mol_type = other DNA
caccaactggttcctcccccaggaa

SEQ ID NO: 7454 - DNA, 25 bp, synthetic construct
  source 1..25: mol_type = other DNA; mol_type = other DNA
caccaactggttcctcccccagaaa

SEQ ID NO: 7455 - DNA, 25 bp, synthetic construct
  source 1..25: mol_type = other DNA; mol_type = other DNA
ccaccaactggttcctcccccaggg

SEQ ID NO: 7456 - DNA, 25 bp, synthetic construct
  source 1..25: mol_type = other DNA; mol_type = other DNA
ccaccaactggttcctcccccagga

SEQ ID NO: 7457 - DNA, 25 bp, synthetic construct
  source 1..25: mol_type = other DNA; mol_type = other DNA
ccaccaactggttcctcccccagaa

SEQ ID NO: 7458 - DNA, 25 bp, synthetic construct
  source 1..25: mol_type = other DNA; mol_type = other DNA
gccaccaactggttcctcccccagg

SEQ ID NO: 7459 - DNA, 25 bp, synthetic construct
  source 1..25: mol_type = other DNA; mol_type = other DNA
gccaccaactggttcctcccccaga

SEQ ID NO: 7460 - DNA, 25 bp, synthetic construct
  source 1..25: mol_type = other DNA; mol_type = other DNA
gccaccaactggttcctcccccaaa

SEQ ID NO: 7461 - DNA, 25 bp, synthetic construct
  source 1..25: mol_type = other DNA; mol_type = other DNA
ggccaccaactggttcctcccccaa

SEQ ID NO: 7462 - DNA, 25 bp, synthetic construct
  source 1..25: mol_type = other DNA; mol_type = other DNA
ggccaccaactgattcctcccccaa

SEQ ID NO: 7463 - DNA, 25 bp, synthetic construct
  source 1..25: mol_type = other DNA; mol_type = other DNA
aggccaccaactggttcctccccca

SEQ ID NO: 7464 - DNA, 25 bp, synthetic construct
  source 1..25: mol_type = other DNA; mol_type = other DNA
aggccaccaactgattcctccccca

SEQ ID NO: 7465 - DNA, 25 bp, synthetic construct
  source 1..25: mol_type = other DNA; mol_type = other DNA
aggccaccaactaattcctccccca

SEQ ID NO: 7466 - DNA, 25 bp, synthetic construct
  source 1..25: mol_type = other DNA; mol_type = other DNA
caggccaccaactggttcctccccc

SEQ ID NO: 7467 - DNA, 25 bp, synthetic construct
  source 1..25: mol_type = other DNA; mol_type = other DNA
caggccaccaactgattcctccccc

SEQ ID NO: 7468 - DNA, 25 bp, synthetic construct
  source 1..25: mol_type = other DNA; mol_type = other DNA
caggccaccaactaattcctccccc

SEQ ID NO: 7469 - DNA, 25 bp, synthetic construct
  source 1..25: mol_type = other DNA; mol_type = other DNA
ccaggccaccaactgattcctcccc

SEQ ID NO: 7470 - DNA, 25 bp, synthetic construct
  source 1..25: mol_type = other DNA; mol_type = other DNA
ccaggccaccaactaattcctcccc

SEQ ID NO: 7471 - DNA, 25 bp, synthetic construct
  source 1..25: mol_type = other DNA; mol_type = other DNA
cccaggccaccaactggttcctccc

SEQ ID NO: 7472 - DNA, 25 bp, synthetic construct
  source 1..25: mol_type = other DNA; mol_type = other DNA
cccaggccaccaactgattcctccc

SEQ ID NO: 7473 - DNA, 25 bp, synthetic construct
  source 1..25: mol_type = other DNA; mol_type = other DNA
cccaggccaccaactaattcctccc

SEQ ID NO: 7474 - DNA, 25 bp, synthetic construct
  source 1..25: mol_type = other DNA; mol_type = other DNA
gcccaggccaccaactggttcctcc

SEQ ID NO: 7475 - DNA, 25 bp, synthetic construct
  source 1..25: mol_type = other DNA; mol_type = other DNA
gcccaggccaccaactgattcctcc

SEQ ID NO: 7476 - DNA, 25 bp, synthetic construct
  source 1..25: mol_type = other DNA; mol_type = other DNA
gcccaggccaccaactaattcctcc

SEQ ID NO: 7477 - DNA, 25 bp, synthetic construct
  source 1..25: mol_type = other DNA; mol_type = other DNA
tgcccaggccaccaactgattcctc

SEQ ID NO: 7478 - DNA, 25 bp, synthetic construct
  source 1..25: mol_type = other DNA; mol_type = other DNA
tgcccaggccaccaactaattcctc

SEQ ID NO: 7479 - DNA, 25 bp, synthetic construct
  source 1..25: mol_type = other DNA; mol_type = other DNA
ctgcccaggccaccaactggttcct

SEQ ID NO: 7480 - DNA, 25 bp, synthetic construct
  source 1..25: mol_type = other DNA; mol_type = other DNA
ctgcccaggccaccaactgattcct

SEQ ID NO: 7481 - DNA, 25 bp, synthetic construct
  source 1..25: mol_type = other DNA; mol_type = other DNA
ctgcccaggccaccaactaattcct

SEQ ID NO: 7482 - DNA, 25 bp, synthetic construct
  source 1..25: mol_type = other DNA; mol_type = other DNA
gctgcccaggccaccaactggttcc

SEQ ID NO: 7483 - DNA, 25 bp, synthetic construct
  source 1..25: mol_type = other DNA; mol_type = other DNA
gctgcccaggccaccaactgattcc

SEQ ID NO: 7484 - DNA, 25 bp, synthetic construct
  source 1..25: mol_type = other DNA; mol_type = other DNA
gctgcccaggccaccaactaattcc

SEQ ID NO: 7485 - DNA, 25 bp, synthetic construct
  source 1..25: mol_type = other DNA; mol_type = other DNA
ggctgcccaggccaccaactgattc

SEQ ID NO: 7486 - DNA, 25 bp, synthetic construct
  source 1..25: mol_type = other DNA; mol_type = other DNA
ggctgcccaggccaccaactaattc

SEQ ID NO: 7487 - DNA, 25 bp, synthetic construct
  source 1..25: mol_type = other DNA; mol_type = other DNA
aggctgcccaggccaccaactggtt

SEQ ID NO: 7488 - DNA, 25 bp, synthetic construct
  source 1..25: mol_type = other DNA; mol_type = other DNA
aggctgcccaggccaccaactgatt

SEQ ID NO: 7489 - DNA, 25 bp, synthetic construct
  source 1..25: mol_type = other DNA; mol_type = other DNA
aggctgcccaggccaccaactaatt

SEQ ID NO: 7490 - DNA, 25 bp, synthetic construct
  source 1..25: mol_type = other DNA; mol_type = other DNA
caggctgcccaggccaccaactggt

SEQ ID NO: 7491 - DNA, 25 bp, synthetic construct
  source 1..25: mol_type = other DNA; mol_type = other DNA
caggctgcccaggccaccaactgat

SEQ ID NO: 7492 - DNA, 25 bp, synthetic construct
  source 1..25: mol_type = other DNA; mol_type = other DNA
caggctgcccaggccaccaactaat

SEQ ID NO: 7493 - DNA, 25 bp, synthetic construct
  source 1..25: mol_type = other DNA; mol_type = other DNA
gcaggctgcccaggccaccaactga

SEQ ID NO: 7494 - DNA, 25 bp, synthetic construct
  source 1..25: mol_type = other DNA; mol_type = other DNA
gcaggctgcccaggccaccaactaa

SEQ ID NO: 7495 - DNA, 25 bp, synthetic construct
  source 1..25: mol_type = other DNA; mol_type = other DNA
agcaggctgcccaggccaccaactg

SEQ ID NO: 7496 - DNA, 25 bp, synthetic construct
  source 1..25: mol_type = other DNA; mol_type = other DNA
agcaggctgcccaggccaccaacta

SEQ ID NO: 7497 - DNA, 25 bp, synthetic construct
  source 1..25: mol_type = other DNA; mol_type = other DNA
agcaggctgcccagaccaccaacta

SEQ ID NO: 7498 - DNA, 25 bp, synthetic construct
  source 1..25: mol_type = other DNA; mol_type = other DNA
cagcaggctgcccaggccaccaact

SEQ ID NO: 7499 - DNA, 25 bp, synthetic construct
  source 1..25: mol_type = other DNA; mol_type = other DNA
cagcaggctgcccagaccaccaact

SEQ ID NO: 7500 - DNA, 25 bp, synthetic construct
  source 1..25: mol_type = other DNA; mol_type = other DNA
cagcaggctgcccaaaccaccaact

SEQ ID NO: 7501 - DNA, 25 bp, synthetic construct
  source 1..25: mol_type = other DNA; mol_type = other DNA
ccagcaggctgcccagaccaccaac

SEQ ID NO: 7502 - DNA, 25 bp, synthetic construct
  source 1..25: mol_type = other DNA; mol_type = other DNA
ccagcaggctgcccaaaccaccaac

SEQ ID NO: 7503 - DNA, 25 bp, synthetic construct
  source 1..25: mol_type = other DNA; mol_type = other DNA
tccagcaggctgcccaggccaccaa

SEQ ID NO: 7504 - DNA, 25 bp, synthetic construct
  source 1..25: mol_type = other DNA; mol_type = other DNA
tccagcaggctgcccagaccaccaa

SEQ ID NO: 7505 - DNA, 25 bp, synthetic construct
  source 1..25: mol_type = other DNA; mol_type = other DNA
tccagcaggctgcccaaaccaccaa

SEQ ID NO: 7506 - DNA, 25 bp, synthetic construct
  source 1..25: mol_type = other DNA; mol_type = other DNA
gtccagcaggctgcccaggccacca

SEQ ID NO: 7507 - DNA, 25 bp, synthetic construct
  source 1..25: mol_type = other DNA; mol_type = other DNA
gtccagcaggctgcccagaccacca

SEQ ID NO: 7508 - DNA, 25 bp, synthetic construct
  source 1..25: mol_type = other DNA; mol_type = other DNA
gtccagcaggctgcccaaaccacca

SEQ ID NO: 7509 - DNA, 25 bp, synthetic construct
  source 1..25: mol_type = other DNA; mol_type = other DNA
ggtccagcaggctgcccagaccacc

SEQ ID NO: 7510 - DNA, 25 bp, synthetic construct
  source 1..25: mol_type = other DNA; mol_type = other DNA
ggtccagcaggctgcccaaaccacc

SEQ ID NO: 7511 - DNA, 25 bp, synthetic construct
  source 1..25: mol_type = other DNA; mol_type = other DNA
gggtccagcaggctgcccaggccac

SEQ ID NO: 7512 - DNA, 25 bp, synthetic construct
  source 1..25: mol_type = other DNA; mol_type = other DNA
gggtccagcaggctgcccagaccac

SEQ ID NO: 7513 - DNA, 25 bp, synthetic construct
  source 1..25: mol_type = other DNA; mol_type = other DNA
gggtccagcaggctgcccaaaccac

SEQ ID NO: 7514 - DNA, 25 bp, synthetic construct
  source 1..25: mol_type = other DNA; mol_type = other DNA
agggtccagcaggctgcccaggcca

SEQ ID NO: 7515 - DNA, 25 bp, synthetic construct
  source 1..25: mol_type = other DNA; mol_type = other DNA
agggtccagcaggctgcccagacca

SEQ ID NO: 7516 - DNA, 25 bp, synthetic construct
  source 1..25: mol_type = other DNA; mol_type = other DNA
agggtccagcaggctgcccaaacca

SEQ ID NO: 7517 - DNA, 25 bp, synthetic construct
  source 1..25: mol_type = other DNA; mol_type = other DNA
cagggtccagcaggctgcccagacc

SEQ ID NO: 7518 - DNA, 25 bp, synthetic construct
  source 1..25: mol_type = other DNA; mol_type = other DNA
cagggtccagcaggctgcccaaacc

SEQ ID NO: 7519 - DNA, 25 bp, synthetic construct
  source 1..25: mol_type = other DNA; mol_type = other DNA
gcagggtccagcaggctgcccaggc

SEQ ID NO: 7520 - DNA, 25 bp, synthetic construct
  source 1..25: mol_type = other DNA; mol_type = other DNA
gcagggtccagcaggctgcccagac

SEQ ID NO: 7521 - DNA, 25 bp, synthetic construct
  source 1..25: mol_type = other DNA; mol_type = other DNA
gcagggtccagcaggctgcccaaac

SEQ ID NO: 7522 - DNA, 25 bp, synthetic construct
  source 1..25: mol_type = other DNA; mol_type = other DNA
ggcagggtccagcaggctgcccagg

SEQ ID NO: 7523 - DNA, 25 bp, synthetic construct
  source 1..25: mol_type = other DNA; mol_type = other DNA
ggcagggtccagcaggctgcccaga

SEQ ID NO: 7524 - DNA, 25 bp, synthetic construct
  source 1..25: mol_type = other DNA; mol_type = other DNA
ggcagggtccagcaggctgcccaaa

SEQ ID NO: 7525 - DNA, 25 bp, synthetic construct
  source 1..25: mol_type = other DNA; mol_type = other DNA
tggcagggtccagcaggctgcccaa

SEQ ID NO: 7526 - DNA, 25 bp, synthetic construct
  source 1..25: mol_type = other DNA; mol_type = other DNA
tggcagggtccagcaggctacccaa

SEQ ID NO: 7527 - DNA, 25 bp, synthetic construct
  source 1..25: mol_type = other DNA; mol_type = other DNA
ttggcagggtccagcaggctgccca

SEQ ID NO: 7528 - DNA, 25 bp, synthetic construct
  source 1..25: mol_type = other DNA; mol_type = other DNA
ttggcagggtccagcaggctaccca

SEQ ID NO: 7529 - DNA, 25 bp, synthetic construct
  source 1..25: mol_type = other DNA; mol_type = other DNA
ttggcagggtccagcagactaccca

SEQ ID NO: 7530 - DNA, 25 bp, synthetic construct
  source 1..25: mol_type = other DNA; mol_type = other DNA
cttggcagggtccagcaggctgccc

SEQ ID NO: 7531 - DNA, 25 bp, synthetic construct
  source 1..25: mol_type = other DNA; mol_type = other DNA
cttggcagggtccagcaggctaccc

SEQ ID NO: 7532 - DNA, 25 bp, synthetic construct
  source 1..25: mol_type = other DNA; mol_type = other DNA
cttggcagggtccagcagactaccc

SEQ ID NO: 7533 - DNA, 25 bp, synthetic construct
  source 1..25: mol_type = other DNA; mol_type = other DNA
tcttggcagggtccagcaggctacc

SEQ ID NO: 7534 - DNA, 25 bp, synthetic construct
  source 1..25: mol_type = other DNA; mol_type = other DNA
tcttggcagggtccagcagactacc

SEQ ID NO: 7535 - DNA, 25 bp, synthetic construct
  source 1..25: mol_type = other DNA; mol_type = other DNA
ttcttggcagggtccagcaggctgc

SEQ ID NO: 7536 - DNA, 25 bp, synthetic construct
  source 1..25: mol_type = other DNA; mol_type = other DNA
ttcttggcagggtccagcaggctac

SEQ ID NO: 7537 - DNA, 25 bp, synthetic construct
  source 1..25: mol_type = other DNA; mol_type = other DNA
ttcttggcagggtccagcagactac

SEQ ID NO: 7538 - DNA, 25 bp, synthetic construct
  source 1..25: mol_type = other DNA; mol_type = other DNA
cttcttggcagggtccagcaggctg

SEQ ID NO: 7539 - DNA, 25 bp, synthetic construct
  source 1..25: mol_type = other DNA; mol_type = other DNA
cttcttggcagggtccagcaggcta

SEQ ID NO: 7540 - DNA, 25 bp, synthetic construct
  source 1..25: mol_type = other DNA; mol_type = other DNA
cttcttggcagggtccagcagacta

SEQ ID NO: 7541 - DNA, 25 bp, synthetic construct
  source 1..25: mol_type = other DNA; mol_type = other DNA
acttcttggcagggtccagcagact

SEQ ID NO: 7542 - DNA, 25 bp, synthetic construct
  source 1..25: mol_type = other DNA; mol_type = other DNA
acttcttggcagggtccagcaaact

SEQ ID NO: 7543 - DNA, 25 bp, synthetic construct
  source 1..25: mol_type = other DNA; mol_type = other DNA
gacttcttggcagggtccagcaggc

SEQ ID NO: 7544 - DNA, 25 bp, synthetic construct
  source 1..25: mol_type = other DNA; mol_type = other DNA
gacttcttggcagggtccagcagac

SEQ ID NO: 7545 - DNA, 25 bp, synthetic construct
  source 1..25: mol_type = other DNA; mol_type = other DNA
gacttcttggcagggtccagcaaac

SEQ ID NO: 7546 - DNA, 25 bp, synthetic construct
  source 1..25: mol_type = other DNA; mol_type = other DNA
cgacttcttggcagggtccagcagg

SEQ ID NO: 7547 - DNA, 25 bp, synthetic construct
  source 1..25: mol_type = other DNA; mol_type = other DNA
cgacttcttggcagggtccagcaga

SEQ ID NO: 7548 - DNA, 25 bp, synthetic construct
  source 1..25: mol_type = other DNA; mol_type = other DNA
cgacttcttggcagggtccagcaaa

SEQ ID NO: 7549 - DNA, 25 bp, synthetic construct
  source 1..25: mol_type = other DNA; mol_type = other DNA
gcgacttcttggcagggtccagcaa

SEQ ID NO: 7550 - DNA, 25 bp, synthetic construct
  source 1..25: mol_type = other DNA; mol_type = other DNA
gcgacttcttggcagggtccaacaa

SEQ ID NO: 7551 - DNA, 25 bp, synthetic construct
  source 1..25: mol_type = other DNA; mol_type = other DNA
ggcgacttcttggcagggtccagca

SEQ ID NO: 7552 - DNA, 25 bp, synthetic construct
  source 1..25: mol_type = other DNA; mol_type = other DNA
ggcgacttcttggcagggtccaaca

SEQ ID NO: 7553 - DNA, 25 bp, synthetic construct
  source 1..25: mol_type = other DNA; mol_type = other DNA
ggcgacttcttggcaggatccaaca

SEQ ID NO: 7554 - DNA, 25 bp, synthetic construct
  source 1..25: mol_type = other DNA; mol_type = other DNA
gggcgacttcttggcagggtccagc

SEQ ID NO: 7555 - DNA, 25 bp, synthetic construct
  source 1..25: mol_type = other DNA; mol_type = other DNA
gggcgacttcttggcagggtccaac

SEQ ID NO: 7556 - DNA, 25 bp, synthetic construct
  source 1..25: mol_type = other DNA; mol_type = other DNA
gggcgacttcttggcaggatccaac

SEQ ID NO: 7557 - DNA, 25 bp, synthetic construct
  source 1..25: mol_type = other DNA; mol_type = other DNA
tgggcgacttcttggcagggtccaa

SEQ ID NO: 7558 - DNA, 25 bp, synthetic construct
  source 1..25: mol_type = other DNA; mol_type = other DNA
tgggcgacttcttggcaggatccaa

SEQ ID NO: 7559 - DNA, 25 bp, synthetic construct
  source 1..25: mol_type = other DNA; mol_type = other DNA
atgggcgacttcttggcagggtcca

SEQ ID NO: 7560 - DNA, 25 bp, synthetic construct
  source 1..25: mol_type = other DNA; mol_type = other DNA
atgggcgacttcttggcaggatcca

SEQ ID NO: 7561 - DNA, 25 bp, synthetic construct
  source 1..25: mol_type = other DNA; mol_type = other DNA
atgggcgacttcttggcagaatcca

SEQ ID NO: 7562 - DNA, 25 bp, synthetic construct
  source 1..25: mol_type = other DNA; mol_type = other DNA
gatgggcgacttcttggcagggtcc

SEQ ID NO: 7563 - DNA, 25 bp, synthetic construct
  source 1..25: mol_type = other DNA; mol_type = other DNA
gatgggcgacttcttggcaggatcc

SEQ ID NO: 7564 - DNA, 25 bp, synthetic construct
  source 1..25: mol_type = other DNA; mol_type = other DNA
gatgggcgacttcttggcagaatcc

SEQ ID NO: 7565 - DNA, 25 bp, synthetic construct
  source 1..25: mol_type = other DNA; mol_type = other DNA
cgatgggcgacttcttggcaggatc

SEQ ID NO: 7566 - DNA, 25 bp, synthetic construct
  source 1..25: mol_type = other DNA; mol_type = other DNA
cgatgggcgacttcttggcagaatc

SEQ ID NO: 7567 - DNA, 25 bp, synthetic construct
  source 1..25: mol_type = other DNA; mol_type = other DNA
gcgatgggcgacttcttggcagggt

SEQ ID NO: 7568 - DNA, 25 bp, synthetic construct
  source 1..25: mol_type = other DNA; mol_type = other DNA
gcgatgggcgacttcttggcaggat

SEQ ID NO: 7569 - DNA, 25 bp, synthetic construct
  source 1..25: mol_type = other DNA; mol_type = other DNA
gcgatgggcgacttcttggcagaat

SEQ ID NO: 7570 - DNA, 25 bp, synthetic construct
  source 1..25: mol_type = other DNA; mol_type = other DNA
tgcgatgggcgacttcttggcaggg

SEQ ID NO: 7571 - DNA, 25 bp, synthetic construct
  source 1..25: mol_type = other DNA; mol_type = other DNA
tgcgatgggcgacttcttggcagga

SEQ ID NO: 7572 - DNA, 25 bp, synthetic construct
  source 1..25: mol_type = other DNA; mol_type = other DNA
tgcgatgggcgacttcttggcagaa

SEQ ID NO: 7573 - DNA, 25 bp, synthetic construct
  source 1..25: mol_type = other DNA; mol_type = other DNA
ctgcgatgggcgacttcttggcaga

SEQ ID NO: 7574 - DNA, 25 bp, synthetic construct
  source 1..25: mol_type = other DNA; mol_type = other DNA
ctgcgatgggcgacttcttggcaaa

SEQ ID NO: 7575 - DNA, 25 bp, synthetic construct
  source 1..25: mol_type = other DNA; mol_type = other DNA
gctgcgatgggcgacttcttggcag

SEQ ID NO: 7576 - DNA, 25 bp, synthetic construct
  source 1..25: mol_type = other DNA; mol_type = other DNA
gctgcgatgggcgacttcttggcaa

SEQ ID NO: 7577 - DNA, 25 bp, synthetic construct
  source 1..25: mol_type = other DNA; mol_type = other DNA
gctgcgatgggcgacttcttgacaa

SEQ ID NO: 7578 - DNA, 25 bp, synthetic construct
  source 1..25: mol_type = other DNA; mol_type = other DNA
tgctgcgatgggcgacttcttggca

SEQ ID NO: 7579 - DNA, 25 bp, synthetic construct
  source 1..25: mol_type = other DNA; mol_type = other DNA
tgctgcgatgggcgacttcttgaca

SEQ ID NO: 7580 - DNA, 25 bp, synthetic construct
  source 1..25: mol_type = other DNA; mol_type = other DNA
tgctgcgatgggcgacttcttaaca

SEQ ID NO: 7581 - DNA, 25 bp, synthetic construct
  source 1..25: mol_type = other DNA; mol_type = other DNA
ctgctgcgatgggcgacttcttgac

SEQ ID NO: 7582 - DNA, 25 bp, synthetic construct
  source 1..25: mol_type = other DNA; mol_type = other DNA
ctgctgcgatgggcgacttcttaac

SEQ ID NO: 7583 - DNA, 25 bp, synthetic construct
  source 1..25: mol_type = other DNA; mol_type = other DNA
gctgctgcgatgggcgacttcttgg

SEQ ID NO: 7584 - DNA, 25 bp, synthetic construct
  source 1..25: mol_type = other DNA; mol_type = other DNA
gctgctgcgatgggcgacttcttga

SEQ ID NO: 7585 - DNA, 25 bp, synthetic construct
  source 1..25: mol_type = other DNA; mol_type = other DNA
gctgctgcgatgggcgacttcttaa

SEQ ID NO: 7586 - DNA, 25 bp, synthetic construct
  source 1..25: mol_type = other DNA; mol_type = other DNA
agctgctgcgatgggcgacttcttg

SEQ ID NO: 7587 - DNA, 25 bp, synthetic construct
  source 1..25: mol_type = other DNA; mol_type = other DNA
agctgctgcgatgggcgacttctta

SEQ ID NO: 7588 - DNA, 25 bp, synthetic construct
  source 1..25: mol_type = other DNA; mol_type = other DNA
agctgctgcgatgggcaacttctta

SEQ ID NO: 7589 - DNA, 25 bp, synthetic construct
  source 1..25: mol_type = other DNA; mol_type = other DNA
gagctgctgcgatgggcaacttctt

SEQ ID NO: 7590 - DNA, 25 bp, synthetic construct
  source 1..25: mol_type = other DNA; mol_type = other DNA
gagctgctgcgatggacaacttctt

SEQ ID NO: 7591 - DNA, 25 bp, synthetic construct
  source 1..25: mol_type = other DNA; mol_type = other DNA
cgagctgctgcgatgggcgacttct

SEQ ID NO: 7592 - DNA, 25 bp, synthetic construct
  source 1..25: mol_type = other DNA; mol_type = other DNA
cgagctgctgcgatgggcaacttct

SEQ ID NO: 7593 - DNA, 25 bp, synthetic construct
  source 1..25: mol_type = other DNA; mol_type = other DNA
cgagctgctgcgatggacaacttct

SEQ ID NO: 7594 - DNA, 25 bp, synthetic construct
  source 1..25: mol_type = other DNA; mol_type = other DNA
ccgagctgctgcgatgggcgacttc

SEQ ID NO: 7595 - DNA, 25 bp, synthetic construct
  source 1..25: mol_type = other DNA; mol_type = other DNA
ccgagctgctgcgatgggcaacttc

SEQ ID NO: 7596 - DNA, 25 bp, synthetic construct
  source 1..25: mol_type = other DNA; mol_type = other DNA
ccgagctgctgcgatggacaacttc

SEQ ID NO: 7597 - DNA, 25 bp, synthetic construct
  source 1..25: mol_type = other DNA; mol_type = other DNA
accgagctgctgcgatgggcaactt

SEQ ID NO: 7598 - DNA, 25 bp, synthetic construct
  source 1..25: mol_type = other DNA; mol_type = other DNA
accgagctgctgcgatggacaactt

SEQ ID NO: 7599 - DNA, 25 bp, synthetic construct
  source 1..25: mol_type = other DNA; mol_type = other DNA
caccgagctgctgcgatgggcgact

SEQ ID NO: 7600 - DNA, 25 bp, synthetic construct
  source 1..25: mol_type = other DNA; mol_type = other DNA
caccgagctgctgcgatgggcaact

SEQ ID NO: 7601 - DNA, 25 bp, synthetic construct
  source 1..25: mol_type = other DNA; mol_type = other DNA
caccgagctgctgcgatggacaact

SEQ ID NO: 7602 - DNA, 25 bp, synthetic construct
  source 1..25: mol_type = other DNA; mol_type = other DNA
tcaccgagctgctgcgatgggcgac

SEQ ID NO: 7603 - DNA, 25 bp, synthetic construct
  source 1..25: mol_type = other DNA; mol_type = other DNA
tcaccgagctgctgcgatgggcaac

SEQ ID NO: 7604 - DNA, 25 bp, synthetic construct
  source 1..25: mol_type = other DNA; mol_type = other DNA
tcaccgagctgctgcgatggacaac

SEQ ID NO: 7605 - DNA, 25 bp, synthetic construct
  source 1..25: mol_type = other DNA; mol_type = other DNA
ctcaccgagctgctgcgatgggcaa

SEQ ID NO: 7606 - DNA, 25 bp, synthetic construct
  source 1..25: mol_type = other DNA; mol_type = other DNA
ctcaccgagctgctgcgatggacaa

SEQ ID NO: 7607 - DNA, 25 bp, synthetic construct
  source 1..25: mol_type = other DNA; mol_type = other DNA
gctcaccgagctgctgcgatgggcg

SEQ ID NO: 7608 - DNA, 25 bp, synthetic construct
  source 1..25: mol_type = other DNA; mol_type = other DNA
gctcaccgagctgctgcgatgggca

SEQ ID NO: 7609 - DNA, 25 bp, synthetic construct
  source 1..25: mol_type = other DNA; mol_type = other DNA
gctcaccgagctgctgcgatggaca

SEQ ID NO: 7610 - DNA, 25 bp, synthetic construct
  source 1..25: mol_type = other DNA; mol_type = other DNA
tgctcaccgagctgctgcgatgggc

SEQ ID NO: 7611 - DNA, 25 bp, synthetic construct
  source 1..25: mol_type = other DNA; mol_type = other DNA
tgctcaccgagctgctgcgatggac

SEQ ID NO: 7612 - DNA, 25 bp, synthetic construct
  source 1..25: mol_type = other DNA; mol_type = other DNA
tgctcaccgagctgctgcgatgaac

SEQ ID NO: 7613 - DNA, 25 bp, synthetic construct
  source 1..25: mol_type = other DNA; mol_type = other DNA
ctgctcaccgagctgctgcgatgga

SEQ ID NO: 7614 - DNA, 25 bp, synthetic construct
  source 1..25: mol_type = other DNA; mol_type = other DNA
ctgctcaccgagctgctgcgatgaa

SEQ ID NO: 7615 - DNA, 25 bp, synthetic construct
  source 1..25: mol_type = other DNA; mol_type = other DNA
cctgctcaccgagctgctgcgatgg

SEQ ID NO: 7616 - DNA, 25 bp, synthetic construct
  source 1..25: mol_type = other DNA; mol_type = other DNA
cctgctcaccgagctgctgcgatga

SEQ ID NO: 7617 - DNA, 25 bp, synthetic construct
  source 1..25: mol_type = other DNA; mol_type = other DNA
cctgctcaccgagctgctgcgataa

SEQ ID NO: 7618 - DNA, 25 bp, synthetic construct
  source 1..25: mol_type = other DNA; mol_type = other DNA
ccctgctcaccgagctgctgcgatg

SEQ ID NO: 7619 - DNA, 25 bp, synthetic construct
  source 1..25: mol_type = other DNA; mol_type = other DNA
ccctgctcaccgagctgctgcgata

SEQ ID NO: 7620 - DNA, 25 bp, synthetic construct
  source 1..25: mol_type = other DNA; mol_type = other DNA
ccctgctcaccgagctgctgcaata

SEQ ID NO: 7621 - DNA, 25 bp, synthetic construct
  source 1..25: mol_type = other DNA; mol_type = other DNA
gccctgctcaccgagctgctgcaat

SEQ ID NO: 7622 - DNA, 25 bp, synthetic construct
  source 1..25: mol_type = other DNA; mol_type = other DNA
gccctgctcaccgagctgctacaat

SEQ ID NO: 7623 - DNA, 25 bp, synthetic construct
  source 1..25: mol_type = other DNA; mol_type = other DNA
cgccctgctcaccgagctgctgcga

SEQ ID NO: 7624 - DNA, 25 bp, synthetic construct
  source 1..25: mol_type = other DNA; mol_type = other DNA
cgccctgctcaccgagctgctgcaa

SEQ ID NO: 7625 - DNA, 25 bp, synthetic construct
  source 1..25: mol_type = other DNA; mol_type = other DNA
cgccctgctcaccgagctgctacaa

SEQ ID NO: 7626 - DNA, 25 bp, synthetic construct
  source 1..25: mol_type = other DNA; mol_type = other DNA
ccgccctgctcaccgagctgctgcg

SEQ ID NO: 7627 - DNA, 25 bp, synthetic construct
  source 1..25: mol_type = other DNA; mol_type = other DNA
ccgccctgctcaccgagctgctgca

SEQ ID NO: 7628 - DNA, 25 bp, synthetic construct
  source 1..25: mol_type = other DNA; mol_type = other DNA
ccgccctgctcaccgagctgctaca

SEQ ID NO: 7629 - DNA, 25 bp, synthetic construct
  source 1..25: mol_type = other DNA; mol_type = other DNA
accgccctgctcaccgagctgctac

SEQ ID NO: 7630 - DNA, 25 bp, synthetic construct
  source 1..25: mol_type = other DNA; mol_type = other DNA
accgccctgctcaccgagctactac

SEQ ID NO: 7631 - DNA, 25 bp, synthetic construct
  source 1..25: mol_type = other DNA; mol_type = other DNA
caccgccctgctcaccgagctgctg

SEQ ID NO: 7632 - DNA, 25 bp, synthetic construct
  source 1..25: mol_type = other DNA; mol_type = other DNA
caccgccctgctcaccgagctgcta

SEQ ID NO: 7633 - DNA, 25 bp, synthetic construct
  source 1..25: mol_type = other DNA; mol_type = other DNA
caccgccctgctcaccgagctacta

SEQ ID NO: 7634 - DNA, 25 bp, synthetic construct
  source 1..25: mol_type = other DNA; mol_type = other DNA
gcaccgccctgctcaccgagctgct

SEQ ID NO: 7635 - DNA, 25 bp, synthetic construct
  source 1..25: mol_type = other DNA; mol_type = other DNA
gcaccgccctgctcaccgagctact

SEQ ID NO: 7636 - DNA, 25 bp, synthetic construct
  source 1..25: mol_type = other DNA; mol_type = other DNA
gcaccgccctgctcaccgaactact

SEQ ID NO: 7637 - DNA, 25 bp, synthetic construct
  source 1..25: mol_type = other DNA; mol_type = other DNA
cgcaccgccctgctcaccgagctac

SEQ ID NO: 7638 - DNA, 25 bp, synthetic construct
  source 1..25: mol_type = other DNA; mol_type = other DNA
cgcaccgccctgctcaccgaactac

SEQ ID NO: 7639 - DNA, 25 bp, synthetic construct
  source 1..25: mol_type = other DNA; mol_type = other DNA
ccgcaccgccctgctcaccgagctg

SEQ ID NO: 7640 - DNA, 25 bp, synthetic construct
  source 1..25: mol_type = other DNA; mol_type = other DNA
ccgcaccgccctgctcaccgagcta

SEQ ID NO: 7641 - DNA, 25 bp, synthetic construct
  source 1..25: mol_type = other DNA; mol_type = other DNA
ccgcaccgccctgctcaccgaacta

SEQ ID NO: 7642 - DNA, 25 bp, synthetic construct
  source 1..25: mol_type = other DNA; mol_type = other DNA
cccgcaccgccctgctcaccgagct

SEQ ID NO: 7643 - DNA, 25 bp, synthetic construct
  source 1..25: mol_type = other DNA; mol_type = other DNA
cccgcaccgccctgctcaccgaact

SEQ ID NO: 7644 - DNA, 25 bp, synthetic construct
  source 1..25: mol_type = other DNA; mol_type = other DNA
cccgcaccgccctgctcaccaaact

SEQ ID NO: 7645 - DNA, 25 bp, synthetic construct
  source 1..25: mol_type = other DNA; mol_type = other DNA
ccccgcaccgccctgctcaccgaac

SEQ ID NO: 7646 - DNA, 25 bp, synthetic construct
  source 1..25: mol_type = other DNA; mol_type = other DNA
ccccgcaccgccctgctcaccaaac

SEQ ID NO: 7647 - DNA, 25 bp, synthetic construct
  source 1..25: mol_type = other DNA; mol_type = other DNA
tccccgcaccgccctgctcaccgag

SEQ ID NO: 7648 - DNA, 25 bp, synthetic construct
  source 1..25: mol_type = other DNA; mol_type = other DNA
tccccgcaccgccctgctcaccgaa

SEQ ID NO: 7649 - DNA, 25 bp, synthetic construct
  source 1..25: mol_type = other DNA; mol_type = other DNA
tccccgcaccgccctgctcaccaaa

SEQ ID NO: 7650 - DNA, 25 bp, synthetic construct
  source 1..25: mol_type = other DNA; mol_type = other DNA
ctccccgcaccgccctgctcaccga

SEQ ID NO: 7651 - DNA, 25 bp, synthetic construct
  source 1..25: mol_type = other DNA; mol_type = other DNA
ctccccgcaccgccctgctcaccaa

SEQ ID NO: 7652 - DNA, 25 bp, synthetic construct
  source 1..25: mol_type = other DNA; mol_type = other DNA
ctccccgcaccgccctactcaccaa

SEQ ID NO: 7653 - DNA, 25 bp, synthetic construct
  source 1..25: mol_type = other DNA; mol_type = other DNA
cctccccgcaccgccctgctcacca

SEQ ID NO: 7654 - DNA, 25 bp, synthetic construct
  source 1..25: mol_type = other DNA; mol_type = other DNA
cctccccgcaccgccctactcacca

SEQ ID NO: 7655 - DNA, 25 bp, synthetic construct
  source 1..25: mol_type = other DNA; mol_type = other DNA
ccctccccgcaccgccctgctcacc

SEQ ID NO: 7656 - DNA, 25 bp, synthetic construct
  source 1..25: mol_type = other DNA; mol_type = other DNA
ccctccccgcaccgccctactcacc

SEQ ID NO: 7657 - DNA, 25 bp, synthetic construct
  source 1..25: mol_type = other DNA; mol_type = other DNA
ccctccccgcaccaccctactcacc

SEQ ID NO: 7658 - DNA, 25 bp, synthetic construct
  source 1..25: mol_type = other DNA; mol_type = other DNA
tccctccccgcaccgccctactcac

SEQ ID NO: 7659 - DNA, 25 bp, synthetic construct
  source 1..25: mol_type = other DNA; mol_type = other DNA
tccctccccgcaccaccctactcac

SEQ ID NO: 7660 - DNA, 25 bp, synthetic construct
  source 1..25: mol_type = other DNA; mol_type = other DNA
atccctccccgcaccgccctgctca

SEQ ID NO: 7661 - DNA, 25 bp, synthetic construct
  source 1..25: mol_type = other DNA; mol_type = other DNA
atccctccccgcaccgccctactca

SEQ ID NO: 7662 - DNA, 25 bp, synthetic construct
  source 1..25: mol_type = other DNA; mol_type = other DNA
atccctccccgcaccaccctactca

SEQ ID NO: 7663 - DNA, 25 bp, synthetic construct
  source 1..25: mol_type = other DNA; mol_type = other DNA
gatccctccccgcaccgccctgctc

SEQ ID NO: 7664 - DNA, 25 bp, synthetic construct
  source 1..25: mol_type = other DNA; mol_type = other DNA
gatccctccccgcaccgccctactc

SEQ ID NO: 7665 - DNA, 25 bp, synthetic construct
  source 1..25: mol_type = other DNA; mol_type = other DNA
gatccctccccgcaccaccctactc

SEQ ID NO: 7666 - DNA, 25 bp, synthetic construct
  source 1..25: mol_type = other DNA; mol_type = other DNA
ggatccctccccgcaccgccctact

SEQ ID NO: 7667 - DNA, 25 bp, synthetic construct
  source 1..25: mol_type = other DNA; mol_type = other DNA
ggatccctccccgcaccaccctact

SEQ ID NO: 7668 - DNA, 25 bp, synthetic construct
  source 1..25: mol_type = other DNA; mol_type = other DNA
cggatccctccccgcaccgccctgc

SEQ ID NO: 7669 - DNA, 25 bp, synthetic construct
  source 1..25: mol_type = other DNA; mol_type = other DNA
cggatccctccccgcaccgccctac

SEQ ID NO: 7670 - DNA, 25 bp, synthetic construct
  source 1..25: mol_type = other DNA; mol_type = other DNA
cggatccctccccgcaccaccctac

SEQ ID NO: 7671 - DNA, 25 bp, synthetic construct
  source 1..25: mol_type = other DNA; mol_type = other DNA
acggatccctccccgcaccgccctg

SEQ ID NO: 7672 - DNA, 25 bp, synthetic construct
  source 1..25: mol_type = other DNA; mol_type = other DNA
acggatccctccccgcaccgcccta

SEQ ID NO: 7673 - DNA, 25 bp, synthetic construct
  source 1..25: mol_type = other DNA; mol_type = other DNA
acggatccctccccgcaccacccta

SEQ ID NO: 7674 - DNA, 25 bp, synthetic construct
  source 1..25: mol_type = other DNA; mol_type = other DNA
cacggatccctccccgcaccaccct

SEQ ID NO: 7675 - DNA, 25 bp, synthetic construct
  source 1..25: mol_type = other DNA; mol_type = other DNA
cacggatccctccccacaccaccct

SEQ ID NO: 7676 - DNA, 25 bp, synthetic construct
  source 1..25: mol_type = other DNA; mol_type = other DNA
gcacggatccctccccgcaccgccc

SEQ ID NO: 7677 - DNA, 25 bp, synthetic construct
  source 1..25: mol_type = other DNA; mol_type = other DNA
gcacggatccctccccgcaccaccc

SEQ ID NO: 7678 - DNA, 25 bp, synthetic construct
  source 1..25: mol_type = other DNA; mol_type = other DNA
gcacggatccctccccacaccaccc

SEQ ID NO: 7679 - DNA, 25 bp, synthetic construct
  source 1..25: mol_type = other DNA; mol_type = other DNA
ggcacggatccctccccgcaccgcc

SEQ ID NO: 7680 - DNA, 25 bp, synthetic construct
  source 1..25: mol_type = other DNA; mol_type = other DNA
ggcacggatccctccccgcaccacc

SEQ ID NO: 7681 - DNA, 25 bp, synthetic construct
  source 1..25: mol_type = other DNA; mol_type = other DNA
ggcacggatccctccccacaccacc

SEQ ID NO: 7682 - DNA, 25 bp, synthetic construct
  source 1..25: mol_type = other DNA; mol_type = other DNA
aggcacggatccctccccgcaccac

SEQ ID NO: 7683 - DNA, 25 bp, synthetic construct
  source 1..25: mol_type = other DNA; mol_type = other DNA
aggcacggatccctccccacaccac

SEQ ID NO: 7684 - DNA, 25 bp, synthetic construct
  source 1..25: mol_type = other DNA; mol_type = other DNA
aaggcacggatccctccccgcaccg

SEQ ID NO: 7685 - DNA, 25 bp, synthetic construct
  source 1..25: mol_type = other DNA; mol_type = other DNA
aaggcacggatccctccccgcacca

SEQ ID NO: 7686 - DNA, 25 bp, synthetic construct
  source 1..25: mol_type = other DNA; mol_type = other DNA
aaggcacggatccctccccacacca

SEQ ID NO: 7687 - DNA, 25 bp, synthetic construct
  source 1..25: mol_type = other DNA; mol_type = other DNA
caaggcacggatccctccccgcacc

SEQ ID NO: 7688 - DNA, 25 bp, synthetic construct
  source 1..25: mol_type = other DNA; mol_type = other DNA
caaggcacggatccctccccacacc

SEQ ID NO: 7689 - DNA, 25 bp, synthetic construct
  source 1..25: mol_type = other DNA; mol_type = other DNA
caaggcacgaatccctccccacacc

SEQ ID NO: 7690 - DNA, 25 bp, synthetic construct
  source 1..25: mol_type = other DNA; mol_type = other DNA
acaaggcacggatccctccccacac

SEQ ID NO: 7691 - DNA, 25 bp, synthetic construct
  source 1..25: mol_type = other DNA; mol_type = other DNA
acaaggcacgaatccctccccacac

SEQ ID NO: 7692 - DNA, 25 bp, synthetic construct
  source 1..25: mol_type = other DNA; mol_type = other DNA
gacaaggcacggatccctccccgca

SEQ ID NO: 7693 - DNA, 25 bp, synthetic construct
  source 1..25: mol_type = other DNA; mol_type = other DNA
gacaaggcacggatccctccccaca

SEQ ID NO: 7694 - DNA, 25 bp, synthetic construct
  source 1..25: mol_type = other DNA; mol_type = other DNA
gacaaggcacgaatccctccccaca

SEQ ID NO: 7695 - DNA, 25 bp, synthetic construct
  source 1..25: mol_type = other DNA; mol_type = other DNA
ggacaaggcacggatccctccccgc

SEQ ID NO: 7696 - DNA, 25 bp, synthetic construct
  source 1..25: mol_type = other DNA; mol_type = other DNA
ggacaaggcacggatccctccccac

SEQ ID NO: 7697 - DNA, 25 bp, synthetic construct
  source 1..25: mol_type = other DNA; mol_type = other DNA
ggacaaggcacgaatccctccccac

SEQ ID NO: 7698 - DNA, 25 bp, synthetic construct
  source 1..25: mol_type = other DNA; mol_type = other DNA
cggacaaggcacggatccctcccca

SEQ ID NO: 7699 - DNA, 25 bp, synthetic construct
  source 1..25: mol_type = other DNA; mol_type = other DNA
cggacaaggcacgaatccctcccca

SEQ ID NO: 7700 - DNA, 25 bp, synthetic construct
  source 1..25: mol_type = other DNA; mol_type = other DNA
acggacaaggcacggatccctcccc

SEQ ID NO: 7701 - DNA, 25 bp, synthetic construct
  source 1..25: mol_type = other DNA; mol_type = other DNA
acggacaaggcacgaatccctcccc

SEQ ID NO: 7702 - DNA, 25 bp, synthetic construct
  source 1..25: mol_type = other DNA; mol_type = other DNA
acggacaaggcacaaatccctcccc

SEQ ID NO: 7703 - DNA, 25 bp, synthetic construct
  source 1..25: mol_type = other DNA; mol_type = other DNA
cacggacaaggcacggatccctccc

SEQ ID NO: 7704 - DNA, 25 bp, synthetic construct
  source 1..25: mol_type = other DNA; mol_type = other DNA
cacggacaaggcacgaatccctccc

SEQ ID NO: 7705 - DNA, 25 bp, synthetic construct
  source 1..25: mol_type = other DNA; mol_type = other DNA
cacggacaaggcacaaatccctccc

SEQ ID NO: 7706 - DNA, 25 bp, synthetic construct
  source 1..25: mol_type = other DNA; mol_type = other DNA
ccacggacaaggcacgaatccctcc

SEQ ID NO: 7707 - DNA, 25 bp, synthetic construct
  source 1..25: mol_type = other DNA; mol_type = other DNA
ccacggacaaggcacaaatccctcc

SEQ ID NO: 7708 - DNA, 25 bp, synthetic construct
  source 1..25: mol_type = other DNA; mol_type = other DNA
gccacggacaaggcacggatccctc

SEQ ID NO: 7709 - DNA, 25 bp, synthetic construct
  source 1..25: mol_type = other DNA; mol_type = other DNA
gccacggacaaggcacgaatccctc

SEQ ID NO: 7710 - DNA, 25 bp, synthetic construct
  source 1..25: mol_type = other DNA; mol_type = other DNA
gccacggacaaggcacaaatccctc

SEQ ID NO: 7711 - DNA, 25 bp, synthetic construct
  source 1..25: mol_type = other DNA; mol_type = other DNA
ggccacggacaaggcacggatccct

SEQ ID NO: 7712 - DNA, 25 bp, synthetic construct
  source 1..25: mol_type = other DNA; mol_type = other DNA
ggccacggacaaggcacgaatccct

SEQ ID NO: 7713 - DNA, 25 bp, synthetic construct
  source 1..25: mol_type = other DNA; mol_type = other DNA
ggccacggacaaggcacaaatccct

SEQ ID NO: 7714 - DNA, 25 bp, synthetic construct
  source 1..25: mol_type = other DNA; mol_type = other DNA
gggccacggacaaggcacgaatccc

SEQ ID NO: 7715 - DNA, 25 bp, synthetic construct
  source 1..25: mol_type = other DNA; mol_type = other DNA
gggccacggacaaggcacaaatccc

SEQ ID NO: 7716 - DNA, 25 bp, synthetic construct
  source 1..25: mol_type = other DNA; mol_type = other DNA
tgggccacggacaaggcacggatcc

SEQ ID NO: 7717 - DNA, 25 bp, synthetic construct
  source 1..25: mol_type = other DNA; mol_type = other DNA
gtggccacggacaaggcacggatcc

SEQ ID NO: 7718 - DNA, 25 bp, synthetic construct
  source 1..25: mol_type = other DNA; mol_type = other DNA
ggtgccacggacaaggcacggatcc

SEQ ID NO: 7719 - DNA, 25 bp, synthetic construct
  source 1..25: mol_type = other DNA; mol_type = other DNA
gggtccacggacaaggcacggatcc

SEQ ID NO: 7720 - DNA, 25 bp, synthetic construct
  source 1..25: mol_type = other DNA; mol_type = other DNA
gaagccacggacaaggcacggatcc

SEQ ID NO: 7721 - DNA, 25 bp, synthetic construct
  source 1..25: mol_type = other DNA; mol_type = other DNA
gagaccacggacaaggcacggatcc

SEQ ID NO: 7722 - DNA, 25 bp, synthetic construct
  source 1..25: mol_type = other DNA; mol_type = other DNA
gaggccacagacaaggcacggatcc

SEQ ID NO: 7723 - DNA, 25 bp, synthetic construct
  source 1..25: mol_type = other DNA; mol_type = other DNA
gaggccacgaacaaggcacggatcc

SEQ ID NO: 7724 - DNA, 25 bp, synthetic construct
  source 1..25: mol_type = other DNA; mol_type = other DNA
ctgggccacggacaaggcacggatc

SEQ ID NO: 7725 - DNA, 25 bp, synthetic construct
  source 1..25: mol_type = other DNA; mol_type = other DNA
cgtggccacggacaaggcacggatc

SEQ ID NO: 7726 - DNA, 25 bp, synthetic construct
  source 1..25: mol_type = other DNA; mol_type = other DNA
cggtgccacggacaaggcacggatc

SEQ ID NO: 7727 - DNA, 25 bp, synthetic construct
  source 1..25: mol_type = other DNA; mol_type = other DNA
cgggtccacggacaaggcacggatc

SEQ ID NO: 7728 - DNA, 25 bp, synthetic construct
  source 1..25: mol_type = other DNA; mol_type = other DNA
caaggccacggacaaggcacggatc

SEQ ID NO: 7729 - DNA, 25 bp, synthetic construct
  source 1..25: mol_type = other DNA; mol_type = other DNA
cagagccacggacaaggcacggatc

SEQ ID NO: 7730 - DNA, 25 bp, synthetic construct
  source 1..25: mol_type = other DNA; mol_type = other DNA
caggaccacggacaaggcacggatc

SEQ ID NO: 7731 - DNA, 25 bp, synthetic construct
  source 1..25: mol_type = other DNA; mol_type = other DNA
cagggccacagacaaggcacggatc

SEQ ID NO: 7732 - DNA, 25 bp, synthetic construct
  source 1..25: mol_type = other DNA; mol_type = other DNA
actgggccacggacaaggcacggat

SEQ ID NO: 7733 - DNA, 25 bp, synthetic construct
  source 1..25: mol_type = other DNA; mol_type = other DNA
acgtggccacggacaaggcacggat

SEQ ID NO: 7734 - DNA, 25 bp, synthetic construct
  source 1..25: mol_type = other DNA; mol_type = other DNA
acggtgccacggacaaggcacggat

SEQ ID NO: 7735 - DNA, 25 bp, synthetic construct
  source 1..25: mol_type = other DNA; mol_type = other DNA
acgggtccacggacaaggcacggat

SEQ ID NO: 7736 - DNA, 25 bp, synthetic construct
  source 1..25: mol_type = other DNA; mol_type = other DNA
acaaggccacggacaaggcacggat

SEQ ID NO: 7737 - DNA, 25 bp, synthetic construct
  source 1..25: mol_type = other DNA; mol_type = other DNA
acagagccacggacaaggcacggat

SEQ ID NO: 7738 - DNA, 25 bp, synthetic construct
  source 1..25: mol_type = other DNA; mol_type = other DNA
acaggaccacggacaaggcacggat

SEQ ID NO: 7739 - DNA, 25 bp, synthetic construct
  source 1..25: mol_type = other DNA; mol_type = other DNA
acgaagccacggacaaggcacggat

SEQ ID NO: 7740 - DNA, 25 bp, synthetic construct
  source 1..25: mol_type = other DNA; mol_type = other DNA
gactgggccacggacaaggcacgga

SEQ ID NO: 7741 - DNA, 25 bp, synthetic construct
  source 1..25: mol_type = other DNA; mol_type = other DNA
gacgtggccacggacaaggcacgga

SEQ ID NO: 7742 - DNA, 25 bp, synthetic construct
  source 1..25: mol_type = other DNA; mol_type = other DNA
gacggtgccacggacaaggcacgga

SEQ ID NO: 7743 - DNA, 25 bp, synthetic construct
  source 1..25: mol_type = other DNA; mol_type = other DNA
gacgggtccacggacaaggcacgga

SEQ ID NO: 7744 - DNA, 25 bp, synthetic construct
  source 1..25: mol_type = other DNA; mol_type = other DNA
aacgaggccacggacaaggcacgga

SEQ ID NO: 7745 - DNA, 25 bp, synthetic construct
  source 1..25: mol_type = other DNA; mol_type = other DNA
aacggagccacggacaaggcacgga

SEQ ID NO: 7746 - DNA, 25 bp, synthetic construct
  source 1..25: mol_type = other DNA; mol_type = other DNA
gacagagccacggacaaggcacgga

SEQ ID NO: 7747 - DNA, 25 bp, synthetic construct
  source 1..25: mol_type = other DNA; mol_type = other DNA
gacaggaccacggacaaggcacgga

SEQ ID NO: 7748 - DNA, 25 bp, synthetic construct
  source 1..25: mol_type = other DNA; mol_type = other DNA
agactgggccacggacaaggcacgg

SEQ ID NO: 7749 - DNA, 25 bp, synthetic construct
  source 1..25: mol_type = other DNA; mol_type = other DNA
agacgtggccacggacaaggcacgg

SEQ ID NO: 7750 - DNA, 25 bp, synthetic construct
  source 1..25: mol_type = other DNA; mol_type = other DNA
agacggtgccacggacaaggcacgg

SEQ ID NO: 7751 - DNA, 25 bp, synthetic construct
  source 1..25: mol_type = other DNA; mol_type = other DNA
agacgggtccacggacaaggcacgg

SEQ ID NO: 7752 - DNA, 25 bp, synthetic construct
  source 1..25: mol_type = other DNA; mol_type = other DNA
aaacgaggccacggacaaggcacgg

SEQ ID NO: 7753 - DNA, 25 bp, synthetic construct
  source 1..25: mol_type = other DNA; mol_type = other DNA
aaacggagccacggacaaggcacgg

SEQ ID NO: 7754 - DNA, 25 bp, synthetic construct
  source 1..25: mol_type = other DNA; mol_type = other DNA
agacaaggccacggacaaggcacgg

SEQ ID NO: 7755 - DNA, 25 bp, synthetic construct
  source 1..25: mol_type = other DNA; mol_type = other DNA
agacagagccacggacaaggcacgg

SEQ ID NO: 7756 - DNA, 25 bp, synthetic construct
  source 1..25: mol_type = other DNA; mol_type = other DNA
cagactgggccacggacaaggcacg

SEQ ID NO: 7757 - DNA, 25 bp, synthetic construct
  source 1..25: mol_type = other DNA; mol_type = other DNA
cagacgtggccacggacaaggcacg

SEQ ID NO: 7758 - DNA, 25 bp, synthetic construct
  source 1..25: mol_type = other DNA; mol_type = other DNA
cagacggtgccacggacaaggcacg

SEQ ID NO: 7759 - DNA, 25 bp, synthetic construct
  source 1..25: mol_type = other DNA; mol_type = other DNA
cagacgggtccacggacaaggcacg

SEQ ID NO: 7760 - DNA, 25 bp, synthetic construct
  source 1..25: mol_type = other DNA; mol_type = other DNA
caaacggagccacggacaaggcacg

SEQ ID NO: 7761 - DNA, 25 bp, synthetic construct
  source 1..25: mol_type = other DNA; mol_type = other DNA
cagacaaggccacggacaaggcacg

SEQ ID NO: 7762 - DNA, 25 bp, synthetic construct
  source 1..25: mol_type = other DNA; mol_type = other DNA
cagacagagccacggacaaggcacg

SEQ ID NO: 7763 - DNA, 25 bp, synthetic construct
  source 1..25: mol_type = other DNA; mol_type = other DNA
cagacaggaccacggacaaggcacg

SEQ ID NO: 7764 - DNA, 25 bp, synthetic construct
  source 1..25: mol_type = other DNA; mol_type = other DNA
acagactgggccacggacaaggcac

SEQ ID NO: 7765 - DNA, 25 bp, synthetic construct
  source 1..25: mol_type = other DNA; mol_type = other DNA
acagacgtggccacggacaaggcac

SEQ ID NO: 7766 - DNA, 25 bp, synthetic construct
  source 1..25: mol_type = other DNA; mol_type = other DNA
acagacggtgccacggacaaggcac

SEQ ID NO: 7767 - DNA, 25 bp, synthetic construct
  source 1..25: mol_type = other DNA; mol_type = other DNA
acagacgggtccacggacaaggcac

SEQ ID NO: 7768 - DNA, 25 bp, synthetic construct
  source 1..25: mol_type = other DNA; mol_type = other DNA
acaaacgaggccacggacaaggcac

SEQ ID NO: 7769 - DNA, 25 bp, synthetic construct
  source 1..25: mol_type = other DNA; mol_type = other DNA
acagacaaggccacggacaaggcac

SEQ ID NO: 7770 - DNA, 25 bp, synthetic construct
  source 1..25: mol_type = other DNA; mol_type = other DNA
acagacagagccacggacaaggcac

SEQ ID NO: 7771 - DNA, 25 bp, synthetic construct
  source 1..25: mol_type = other DNA; mol_type = other DNA
acagacaggaccacggacaaggcac

SEQ ID NO: 7772 - DNA, 25 bp, synthetic construct
  source 1..25: mol_type = other DNA; mol_type = other DNA
gacagactgggccacggacaaggca

SEQ ID NO: 7773 - DNA, 25 bp, synthetic construct
  source 1..25: mol_type = other DNA; mol_type = other DNA
gacagacgtggccacggacaaggca

SEQ ID NO: 7774 - DNA, 25 bp, synthetic construct
  source 1..25: mol_type = other DNA; mol_type = other DNA
gacagacggtgccacggacaaggca

SEQ ID NO: 7775 - DNA, 25 bp, synthetic construct
  source 1..25: mol_type = other DNA; mol_type = other DNA
gacagacgggtccacggacaaggca

SEQ ID NO: 7776 - DNA, 25 bp, synthetic construct
  source 1..25: mol_type = other DNA; mol_type = other DNA
aacagacgaggccacggacaaggca

SEQ ID NO: 7777 - DNA, 25 bp, synthetic construct
  source 1..25: mol_type = other DNA; mol_type = other DNA
aacagacggagccacggacaaggca

SEQ ID NO: 7778 - DNA, 25 bp, synthetic construct
  source 1..25: mol_type = other DNA; mol_type = other DNA
gacaaacgaggccacggacaaggca

SEQ ID NO: 7779 - DNA, 25 bp, synthetic construct
  source 1..25: mol_type = other DNA; mol_type = other DNA
gacaaacggagccacggacaaggca

SEQ ID NO: 7780 - DNA, 25 bp, synthetic construct
  source 1..25: mol_type = other DNA; mol_type = other DNA
tgacagactgggccacggacaaggc

SEQ ID NO: 7781 - DNA, 25 bp, synthetic construct
  source 1..25: mol_type = other DNA; mol_type = other DNA
tgacagacgtggccacggacaaggc

SEQ ID NO: 7782 - DNA, 25 bp, synthetic construct
  source 1..25: mol_type = other DNA; mol_type = other DNA
tgacagacggtgccacggacaaggc

SEQ ID NO: 7783 - DNA, 25 bp, synthetic construct
  source 1..25: mol_type = other DNA; mol_type = other DNA
tgacagacgggtccacggacaaggc

SEQ ID NO: 7784 - DNA, 25 bp, synthetic construct
  source 1..25: mol_type = other DNA; mol_type = other DNA
taacagacgaggccacggacaaggc

SEQ ID NO: 7785 - DNA, 25 bp, synthetic construct
  source 1..25: mol_type = other DNA; mol_type = other DNA
taacagacggagccacggacaaggc

SEQ ID NO: 7786 - DNA, 25 bp, synthetic construct
  source 1..25: mol_type = other DNA; mol_type = other DNA
tgacaaacgaggccacggacaaggc

SEQ ID NO: 7787 - DNA, 25 bp, synthetic construct
  source 1..25: mol_type = other DNA; mol_type = other DNA
tgacaaacggagccacggacaaggc

SEQ ID NO: 7788 - DNA, 25 bp, synthetic construct
  source 1..25: mol_type = other DNA; mol_type = other DNA
atgacagactgggccacggacaagg

SEQ ID NO: 7789 - DNA, 25 bp, synthetic construct
  source 1..25: mol_type = other DNA; mol_type = other DNA
atgacagacgtggccacggacaagg

SEQ ID NO: 7790 - DNA, 25 bp, synthetic construct
  source 1..25: mol_type = other DNA; mol_type = other DNA
atgacagacggtgccacggacaagg

SEQ ID NO: 7791 - DNA, 25 bp, synthetic construct
  source 1..25: mol_type = other DNA; mol_type = other DNA
atgacagacgggtccacggacaagg

SEQ ID NO: 7792 - DNA, 25 bp, synthetic construct
  source 1..25: mol_type = other DNA; mol_type = other DNA
ataacagacgaggccacggacaagg

SEQ ID NO: 7793 - DNA, 25 bp, synthetic construct
  source 1..25: mol_type = other DNA; mol_type = other DNA
ataacagacggagccacggacaagg

SEQ ID NO: 7794 - DNA, 25 bp, synthetic construct
  source 1..25: mol_type = other DNA; mol_type = other DNA
atgacaaacgaggccacggacaagg

SEQ ID NO: 7795 - DNA, 25 bp, synthetic construct
  source 1..25: mol_type = other DNA; mol_type = other DNA
atgacaaacggagccacggacaagg

SEQ ID NO: 7796 - DNA, 25 bp, synthetic construct
  source 1..25: mol_type = other DNA; mol_type = other DNA
aatgacagactgggccacggacaag

SEQ ID NO: 7797 - DNA, 25 bp, synthetic construct
  source 1..25: mol_type = other DNA; mol_type = other DNA
aatgacagacgtggccacggacaag

SEQ ID NO: 7798 - DNA, 25 bp, synthetic construct
  source 1..25: mol_type = other DNA; mol_type = other DNA
aatgacagacggtgccacggacaag

SEQ ID NO: 7799 - DNA, 25 bp, synthetic construct
  source 1..25: mol_type = other DNA; mol_type = other DNA
aatgacagacgggtccacggacaag

SEQ ID NO: 7800 - DNA, 25 bp, synthetic construct
  source 1..25: mol_type = other DNA; mol_type = other DNA
aataacagacgaggccacggacaag

SEQ ID NO: 7801 - DNA, 25 bp, synthetic construct
  source 1..25: mol_type = other DNA; mol_type = other DNA
aataacagacggagccacggacaag

SEQ ID NO: 7802 - DNA, 25 bp, synthetic construct
  source 1..25: mol_type = other DNA; mol_type = other DNA
aatgacaaacgaggccacggacaag

SEQ ID NO: 7803 - DNA, 25 bp, synthetic construct
  source 1..25: mol_type = other DNA; mol_type = other DNA
aatgacaaacggagccacggacaag

SEQ ID NO: 7804 - DNA, 25 bp, synthetic construct
  source 1..25: mol_type = other DNA; mol_type = other DNA
gaatgacagactgggccacggacaa

SEQ ID NO: 7805 - DNA, 25 bp, synthetic construct
  source 1..25: mol_type = other DNA; mol_type = other DNA
gaatgacagacgtggccacggacaa

SEQ ID NO: 7806 - DNA, 25 bp, synthetic construct
  source 1..25: mol_type = other DNA; mol_type = other DNA
gaatgacagacggtgccacggacaa

SEQ ID NO: 7807 - DNA, 25 bp, synthetic construct
  source 1..25: mol_type = other DNA; mol_type = other DNA
gaatgacagacgggtccacggacaa

SEQ ID NO: 7808 - DNA, 25 bp, synthetic construct
  source 1..25: mol_type = other DNA; mol_type = other DNA
aaatgacagacgaggccacggacaa

SEQ ID NO: 7809 - DNA, 25 bp, synthetic construct
  source 1..25: mol_type = other DNA; mol_type = other DNA
aaatgacagacggagccacggacaa

SEQ ID NO: 7810 - DNA, 25 bp, synthetic construct
  source 1..25: mol_type = other DNA; mol_type = other DNA
gaataacagacgaggccacggacaa

SEQ ID NO: 7811 - DNA, 25 bp, synthetic construct
  source 1..25: mol_type = other DNA; mol_type = other DNA
gaataacagacggagccacggacaa

SEQ ID NO: 7812 - DNA, 25 bp, synthetic construct
  source 1..25: mol_type = other DNA; mol_type = other DNA
ggaatgacagactgggccacggaca

SEQ ID NO: 7813 - DNA, 25 bp, synthetic construct
  source 1..25: mol_type = other DNA; mol_type = other DNA
ggaatgacagacgtggccacggaca

SEQ ID NO: 7814 - DNA, 25 bp, synthetic construct
  source 1..25: mol_type = other DNA; mol_type = other DNA
ggaatgacagacggtgccacggaca

SEQ ID NO: 7815 - DNA, 25 bp, synthetic construct
  source 1..25: mol_type = other DNA; mol_type = other DNA
ggaatgacagacgggtccacggaca

SEQ ID NO: 7816 - DNA, 25 bp, synthetic construct
  source 1..25: mol_type = other DNA; mol_type = other DNA
agaatgacagacgaggccacggaca

SEQ ID NO: 7817 - DNA, 25 bp, synthetic construct
  source 1..25: mol_type = other DNA; mol_type = other DNA
agaatgacagacggagccacggaca

SEQ ID NO: 7818 - DNA, 25 bp, synthetic construct
  source 1..25: mol_type = other DNA; mol_type = other DNA
gaaatgacagacgaggccacggaca

SEQ ID NO: 7819 - DNA, 25 bp, synthetic construct
  source 1..25: mol_type = other DNA; mol_type = other DNA
gaaatgacagacggagccacggaca

SEQ ID NO: 7820 - DNA, 25 bp, synthetic construct
  source 1..25: mol_type = other DNA; mol_type = other DNA
aggaatgacagactgggccacggac

SEQ ID NO: 7821 - DNA, 25 bp, synthetic construct
  source 1..25: mol_type = other DNA; mol_type = other DNA
aggaatgacagacgtggccacggac

SEQ ID NO: 7822 - DNA, 25 bp, synthetic construct
  source 1..25: mol_type = other DNA; mol_type = other DNA
aggaatgacagacggtgccacggac

SEQ ID NO: 7823 - DNA, 25 bp, synthetic construct
  source 1..25: mol_type = other DNA; mol_type = other DNA
aggaatgacagacgggtccacggac

SEQ ID NO: 7824 - DNA, 25 bp, synthetic construct
  source 1..25: mol_type = other DNA; mol_type = other DNA
aagaatgacagacgaggccacggac

SEQ ID NO: 7825 - DNA, 25 bp, synthetic construct
  source 1..25: mol_type = other DNA; mol_type = other DNA
aagaatgacagacggagccacggac

SEQ ID NO: 7826 - DNA, 25 bp, synthetic construct
  source 1..25: mol_type = other DNA; mol_type = other DNA
agaaatgacagacgaggccacggac

SEQ ID NO: 7827 - DNA, 25 bp, synthetic construct
  source 1..25: mol_type = other DNA; mol_type = other DNA
agaaatgacagacggagccacggac

SEQ ID NO: 7828 - DNA, 25 bp, synthetic construct
  source 1..25: mol_type = other DNA; mol_type = other DNA
gaggaatgacagactgggccacgga

SEQ ID NO: 7829 - DNA, 25 bp, synthetic construct
  source 1..25: mol_type = other DNA; mol_type = other DNA
gaggaatgacagacgtggccacgga

SEQ ID NO: 7830 - DNA, 25 bp, synthetic construct
  source 1..25: mol_type = other DNA; mol_type = other DNA
gaggaatgacagacggtgccacgga

SEQ ID NO: 7831 - DNA, 25 bp, synthetic construct
  source 1..25: mol_type = other DNA; mol_type = other DNA
gaggaatgacagacgggtccacgga

SEQ ID NO: 7832 - DNA, 25 bp, synthetic construct
  source 1..25: mol_type = other DNA; mol_type = other DNA
aaggaatgacagacgaggccacgga

SEQ ID NO: 7833 - DNA, 25 bp, synthetic construct
  source 1..25: mol_type = other DNA; mol_type = other DNA
aaggaatgacagacggagccacgga

SEQ ID NO: 7834 - DNA, 25 bp, synthetic construct
  source 1..25: mol_type = other DNA; mol_type = other DNA
gaagaatgacagacgaggccacgga

SEQ ID NO: 7835 - DNA, 25 bp, synthetic construct
  source 1..25: mol_type = other DNA; mol_type = other DNA
gaagaatgacagacggagccacgga

SEQ ID NO: 7836 - DNA, 25 bp, synthetic construct
  source 1..25: mol_type = other DNA; mol_type = other DNA
agaggaatgacagactgggccacgg

SEQ ID NO: 7837 - DNA, 25 bp, synthetic construct
  source 1..25: mol_type = other DNA; mol_type = other DNA
agaggaatgacagacgtggccacgg

SEQ ID NO: 7838 - DNA, 25 bp, synthetic construct
  source 1..25: mol_type = other DNA; mol_type = other DNA
agaggaatgacagacggtgccacgg

SEQ ID NO: 7839 - DNA, 25 bp, synthetic construct
  source 1..25: mol_type = other DNA; mol_type = other DNA
agaggaatgacagacgggtccacgg

SEQ ID NO: 7840 - DNA, 25 bp, synthetic construct
  source 1..25: mol_type = other DNA; mol_type = other DNA
aaaggaatgacagacgaggccacgg

SEQ ID NO: 7841 - DNA, 25 bp, synthetic construct
  source 1..25: mol_type = other DNA; mol_type = other DNA
aaaggaatgacagacggagccacgg

SEQ ID NO: 7842 - DNA, 25 bp, synthetic construct
  source 1..25: mol_type = other DNA; mol_type = other DNA
agaagaatgacagacgaggccacgg

SEQ ID NO: 7843 - DNA, 25 bp, synthetic construct
  source 1..25: mol_type = other DNA; mol_type = other DNA
agaagaatgacagacggagccacgg

SEQ ID NO: 7844 - DNA, 25 bp, synthetic construct
  source 1..25: mol_type = other DNA; mol_type = other DNA
aagaggaatgacagactgggccacg

SEQ ID NO: 7845 - DNA, 25 bp, synthetic construct
  source 1..25: mol_type = other DNA; mol_type = other DNA
aagaggaatgacagacgtggccacg

SEQ ID NO: 7846 - DNA, 25 bp, synthetic construct
  source 1..25: mol_type = other DNA; mol_type = other DNA
aagaggaatgacagacggtgccacg

SEQ ID NO: 7847 - DNA, 25 bp, synthetic construct
  source 1..25: mol_type = other DNA; mol_type = other DNA
aagaggaatgacagacgggtccacg

SEQ ID NO: 7848 - DNA, 25 bp, synthetic construct
  source 1..25: mol_type = other DNA; mol_type = other DNA
aagaggaatgacagacgggaccaca

SEQ ID NO: 7849 - DNA, 25 bp, synthetic construct
  source 1..25: mol_type = other DNA; mol_type = other DNA
caagaggaatgacagacgggaccac

SEQ ID NO: 7850 - DNA, 25 bp, synthetic construct
  source 1..25: mol_type = other DNA; mol_type = other DNA
caagaggaatgacagacggaaccac

SEQ ID NO: 7851 - DNA, 25 bp, synthetic construct
  source 1..25: mol_type = other DNA; mol_type = other DNA
acaagaggaatgacagacgggacca

SEQ ID NO: 7852 - DNA, 25 bp, synthetic construct
  source 1..25: mol_type = other DNA; mol_type = other DNA
acaagaggaatgacagacggaacca

SEQ ID NO: 7853 - DNA, 25 bp, synthetic construct
  source 1..25: mol_type = other DNA; mol_type = other DNA
gacaagaggaatgacagacgggacc

SEQ ID NO: 7854 - DNA, 25 bp, synthetic construct
  source 1..25: mol_type = other DNA; mol_type = other DNA
gacaagaggaatgacagacggaacc

SEQ ID NO: 7855 - DNA, 25 bp, synthetic construct
  source 1..25: mol_type = other DNA; mol_type = other DNA
agacaagaggaatgacagacgggac

SEQ ID NO: 7856 - DNA, 25 bp, synthetic construct
  source 1..25: mol_type = other DNA; mol_type = other DNA
agacaagaggaatgacagacggaac

SEQ ID NO: 7857 - DNA, 25 bp, synthetic construct
  source 1..25: mol_type = other DNA; mol_type = other DNA
cagacaagaggaatgacagacggga

SEQ ID NO: 7858 - DNA, 25 bp, synthetic construct
  source 1..25: mol_type = other DNA; mol_type = other DNA
cagacaagaggaatgacagacggaa

SEQ ID NO: 7859 - DNA, 25 bp, synthetic construct
  source 1..25: mol_type = other DNA; mol_type = other DNA
acagacaagaggaatgacagacggg

SEQ ID NO: 7860 - DNA, 25 bp, synthetic construct
  source 1..25: mol_type = other DNA; mol_type = other DNA
acagacaagaggaatgacagacgga

SEQ ID NO: 7861 - DNA, 25 bp, synthetic construct
  source 1..25: mol_type = other DNA; mol_type = other DNA
acagacaagaggaatgacagacgaa

SEQ ID NO: 7862 - DNA, 25 bp, synthetic construct
  source 1..25: mol_type = other DNA; mol_type = other DNA
aacagacaagaggaatgacagacga

SEQ ID NO: 7863 - DNA, 25 bp, synthetic construct
  source 1..25: mol_type = other DNA; mol_type = other DNA
aacagacaagaggaatgacagacaa

SEQ ID NO: 7864 - DNA, 25 bp, synthetic construct
  source 1..25: mol_type = other DNA; mol_type = other DNA
gaacagacaagaggaatgacagacg

SEQ ID NO: 7865 - DNA, 25 bp, synthetic construct
  source 1..25: mol_type = other DNA; mol_type = other DNA
gaacagacaagaggaatgacagaca

SEQ ID NO: 7866 - DNA, 25 bp, synthetic construct
  source 1..25: mol_type = other DNA; mol_type = other DNA
gaacagacaagaggaatgacaaaca

SEQ ID NO: 7867 - DNA, 25 bp, synthetic construct
  source 1..25: mol_type = other DNA; mol_type = other DNA
agaacagacaagaggaatgacagac

SEQ ID NO: 7868 - DNA, 25 bp, synthetic construct
  source 1..25: mol_type = other DNA; mol_type = other DNA
agaacagacaagaggaatgacaaac

SEQ ID NO: 7869 - DNA, 25 bp, synthetic construct
  source 1..25: mol_type = other DNA; mol_type = other DNA
agaacagacaagaggaataacaaac

SEQ ID NO: 7870 - DNA, 25 bp, synthetic construct
  source 1..25: mol_type = other DNA; mol_type = other DNA
gagaacagacaagaggaatgacaaa

SEQ ID NO: 7871 - DNA, 25 bp, synthetic construct
  source 1..25: mol_type = other DNA; mol_type = other DNA
gagaacagacaagaggaataacaaa

SEQ ID NO: 7872 - DNA, 25 bp, synthetic construct
  source 1..25: mol_type = other DNA; mol_type = other DNA
agagaacagacaagaggaatgacag

SEQ ID NO: 7873 - DNA, 25 bp, synthetic construct
  source 1..25: mol_type = other DNA; mol_type = other DNA
agagaacagacaagaggaatgacaa

SEQ ID NO: 7874 - DNA, 25 bp, synthetic construct
  source 1..25: mol_type = other DNA; mol_type = other DNA
agagaacagacaagaggaataacaa

SEQ ID NO: 7875 - DNA, 25 bp, synthetic construct
  source 1..25: mol_type = other DNA; mol_type = other DNA
cagagaacagacaagaggaatgaca

SEQ ID NO: 7876 - DNA, 25 bp, synthetic construct
  source 1..25: mol_type = other DNA; mol_type = other DNA
cagagaacagacaagaggaataaca

SEQ ID NO: 7877 - DNA, 25 bp, synthetic construct
  source 1..25: mol_type = other DNA; mol_type = other DNA
cagagaacagacaagagaaataaca

SEQ ID NO: 7878 - DNA, 25 bp, synthetic construct
  source 1..25: mol_type = other DNA; mol_type = other DNA
ccagagaacagacaagaggaataac

SEQ ID NO: 7879 - DNA, 25 bp, synthetic construct
  source 1..25: mol_type = other DNA; mol_type = other DNA
ccagagaacagacaagagaaataac

SEQ ID NO: 7880 - DNA, 25 bp, synthetic construct
  source 1..25: mol_type = other DNA; mol_type = other DNA
gccagagaacagacaagaggaatga

SEQ ID NO: 7881 - DNA, 25 bp, synthetic construct
  source 1..25: mol_type = other DNA; mol_type = other DNA
gccagagaacagacaagaggaataa

SEQ ID NO: 7882 - DNA, 25 bp, synthetic construct
  source 1..25: mol_type = other DNA; mol_type = other DNA
gccagagaacagacaagagaaataa

SEQ ID NO: 7883 - DNA, 25 bp, synthetic construct
  source 1..25: mol_type = other DNA; mol_type = other DNA
agccagagaacagacaagaggaatg

SEQ ID NO: 7884 - DNA, 25 bp, synthetic construct
  source 1..25: mol_type = other DNA; mol_type = other DNA
agccagagaacagacaagaggaata

SEQ ID NO: 7885 - DNA, 25 bp, synthetic construct
  source 1..25: mol_type = other DNA; mol_type = other DNA
agccagagaacagacaagagaaata

SEQ ID NO: 7886 - DNA, 25 bp, synthetic construct
  source 1..25: mol_type = other DNA; mol_type = other DNA
gagccagagaacagacaagagaaat

SEQ ID NO: 7887 - DNA, 25 bp, synthetic construct
  source 1..25: mol_type = other DNA; mol_type = other DNA
gagccagagaacagacaagaaaaat

SEQ ID NO: 7888 - DNA, 25 bp, synthetic construct
  source 1..25: mol_type = other DNA; mol_type = other DNA
agagccagagaacagacaagaggaa

SEQ ID NO: 7889 - DNA, 25 bp, synthetic construct
  source 1..25: mol_type = other DNA; mol_type = other DNA
agagccagagaacagacaagagaaa

SEQ ID NO: 7890 - DNA, 25 bp, synthetic construct
  source 1..25: mol_type = other DNA; mol_type = other DNA
agagccagagaacagacaagaaaaa

SEQ ID NO: 7891 - DNA, 25 bp, synthetic construct
  source 1..25: mol_type = other DNA; mol_type = other DNA
gagagccagagaacagacaagagga

SEQ ID NO: 7892 - DNA, 25 bp, synthetic construct
  source 1..25: mol_type = other DNA; mol_type = other DNA
gagagccagagaacagacaagagaa

SEQ ID NO: 7893 - DNA, 25 bp, synthetic construct
  source 1..25: mol_type = other DNA; mol_type = other DNA
gagagccagagaacagacaagaaaa

SEQ ID NO: 7894 - DNA, 25 bp, synthetic construct
  source 1..25: mol_type = other DNA; mol_type = other DNA
ggagagccagagaacagacaagaga

SEQ ID NO: 7895 - DNA, 25 bp, synthetic construct
  source 1..25: mol_type = other DNA; mol_type = other DNA
ggagagccagagaacagacaagaaa

SEQ ID NO: 7896 - DNA, 25 bp, synthetic construct
  source 1..25: mol_type = other DNA; mol_type = other DNA
aggagagccagagaacagacaagag

SEQ ID NO: 7897 - DNA, 25 bp, synthetic construct
  source 1..25: mol_type = other DNA; mol_type = other DNA
aggagagccagagaacagacaagaa

SEQ ID NO: 7898 - DNA, 25 bp, synthetic construct
  source 1..25: mol_type = other DNA; mol_type = other DNA
aggagagccagagaacagacaaaaa

SEQ ID NO: 7899 - DNA, 25 bp, synthetic construct
  source 1..25: mol_type = other DNA; mol_type = other DNA
caggagagccagagaacagacaaga

SEQ ID NO: 7900 - DNA, 25 bp, synthetic construct
  source 1..25: mol_type = other DNA; mol_type = other DNA
caggagagccagagaacagacaaaa

SEQ ID NO: 7901 - DNA, 25 bp, synthetic construct
  source 1..25: mol_type = other DNA; mol_type = other DNA
caggagagccagagaacaaacaaaa

SEQ ID NO: 7902 - DNA, 25 bp, synthetic construct
  source 1..25: mol_type = other DNA; mol_type = other DNA
acaggagagccagagaacagacaaa

SEQ ID NO: 7903 - DNA, 25 bp, synthetic construct
  source 1..25: mol_type = other DNA; mol_type = other DNA
acaggagagccagagaacaaacaaa

SEQ ID NO: 7904 - DNA, 25 bp, synthetic construct
  source 1..25: mol_type = other DNA; mol_type = other DNA
aacaggagagccagagaacagacaa

SEQ ID NO: 7905 - DNA, 25 bp, synthetic construct
  source 1..25: mol_type = other DNA; mol_type = other DNA
aacaggagagccagagaacaaacaa

SEQ ID NO: 7906 - DNA, 25 bp, synthetic construct
  source 1..25: mol_type = other DNA; mol_type = other DNA
aacaggagagccagaaaacaaacaa

SEQ ID NO: 7907 - DNA, 25 bp, synthetic construct
  source 1..25: mol_type = other DNA; mol_type = other DNA
gaacaggagagccagagaacagaca

SEQ ID NO: 7908 - DNA, 25 bp, synthetic construct
  source 1..25: mol_type = other DNA; mol_type = other DNA
gaacaggagagccagagaacaaaca

SEQ ID NO: 7909 - DNA, 25 bp, synthetic construct
  source 1..25: mol_type = other DNA; mol_type = other DNA
gaacaggagagccagaaaacaaaca

SEQ ID NO: 7910 - DNA, 25 bp, synthetic construct
  source 1..25: mol_type = other DNA; mol_type = other DNA
ggaacaggagagccagagaacaaac

SEQ ID NO: 7911 - DNA, 25 bp, synthetic construct
  source 1..25: mol_type = other DNA; mol_type = other DNA
ggaacaggagagccagaaaacaaac

SEQ ID NO: 7912 - DNA, 25 bp, synthetic construct
  source 1..25: mol_type = other DNA; mol_type = other DNA
aggaacaggagagccagagaacaga

SEQ ID NO: 7913 - DNA, 25 bp, synthetic construct
  source 1..25: mol_type = other DNA; mol_type = other DNA
aggaacaggagagccagagaacaaa

SEQ ID NO: 7914 - DNA, 25 bp, synthetic construct
  source 1..25: mol_type = other DNA; mol_type = other DNA
aggaacaggagagccagaaaacaaa

SEQ ID NO: 7915 - DNA, 25 bp, synthetic construct
  source 1..25: mol_type = other DNA; mol_type = other DNA
gaggaacaggagagccagagaacag

SEQ ID NO: 7916 - DNA, 25 bp, synthetic construct
  source 1..25: mol_type = other DNA; mol_type = other DNA
gaggaacaggagagccagagaacaa

SEQ ID NO: 7917 - DNA, 25 bp, synthetic construct
  source 1..25: mol_type = other DNA; mol_type = other DNA
gaggaacaggagagccagaaaacaa

SEQ ID NO: 7918 - DNA, 25 bp, synthetic construct
  source 1..25: mol_type = other DNA; mol_type = other DNA
ggaggaacaggagagccagaaaaca

SEQ ID NO: 7919 - DNA, 25 bp, synthetic construct
  source 1..25: mol_type = other DNA; mol_type = other DNA
ggaggaacaggagagccaaaaaaca

SEQ ID NO: 7920 - DNA, 25 bp, synthetic construct
  source 1..25: mol_type = other DNA; mol_type = other DNA
aggaggaacaggagagccagagaac

SEQ ID NO: 7921 - DNA, 25 bp, synthetic construct
  source 1..25: mol_type = other DNA; mol_type = other DNA
aggaggaacaggagagccagaaaac

SEQ ID NO: 7922 - DNA, 25 bp, synthetic construct
  source 1..25: mol_type = other DNA; mol_type = other DNA
aggaggaacaggagagccaaaaaac

SEQ ID NO: 7923 - DNA, 25 bp, synthetic construct
  source 1..25: mol_type = other DNA; mol_type = other DNA
aaggaggaacaggagagccagagaa

SEQ ID NO: 7924 - DNA, 25 bp, synthetic construct
  source 1..25: mol_type = other DNA; mol_type = other DNA
aaggaggaacaggagagccagaaaa

SEQ ID NO: 7925 - DNA, 25 bp, synthetic construct
  source 1..25: mol_type = other DNA; mol_type = other DNA
aaggaggaacaggagagccaaaaaa

SEQ ID NO: 7926 - DNA, 25 bp, synthetic construct
  source 1..25: mol_type = other DNA; mol_type = other DNA
caaggaggaacaggagagccagaaa

SEQ ID NO: 7927 - DNA, 25 bp, synthetic construct
  source 1..25: mol_type = other DNA; mol_type = other DNA
caaggaggaacaggagagccaaaaa

SEQ ID NO: 7928 - DNA, 25 bp, synthetic construct
  source 1..25: mol_type = other DNA; mol_type = other DNA
acaaggaggaacaggagagccagag

SEQ ID NO: 7929 - DNA, 25 bp, synthetic construct
  source 1..25: mol_type = other DNA; mol_type = other DNA
acaaggaggaacaggagagccagaa

SEQ ID NO: 7930 - DNA, 25 bp, synthetic construct
  source 1..25: mol_type = other DNA; mol_type = other DNA
acaaggaggaacaggagagccaaaa

SEQ ID NO: 7931 - DNA, 25 bp, synthetic construct
  source 1..25: mol_type = other DNA; mol_type = other DNA
aacaaggaggaacaggagagccaga

SEQ ID NO: 7932 - DNA, 25 bp, synthetic construct
  source 1..25: mol_type = other DNA; mol_type = other DNA
aacaaggaggaacaggagagccaaa

SEQ ID NO: 7933 - DNA, 25 bp, synthetic construct
  source 1..25: mol_type = other DNA; mol_type = other DNA
aacaaggaggaacaggagaaccaaa

SEQ ID NO: 7934 - DNA, 25 bp, synthetic construct
  source 1..25: mol_type = other DNA; mol_type = other DNA
gaacaaggaggaacaggagagccaa

SEQ ID NO: 7935 - DNA, 25 bp, synthetic construct
  source 1..25: mol_type = other DNA; mol_type = other DNA
gaacaaggaggaacaggagaaccaa

SEQ ID NO: 7936 - DNA, 25 bp, synthetic construct
  source 1..25: mol_type = other DNA; mol_type = other DNA
agaacaaggaggaacaggagagcca

SEQ ID NO: 7937 - DNA, 25 bp, synthetic construct
  source 1..25: mol_type = other DNA; mol_type = other DNA
agaacaaggaggaacaggagaacca

SEQ ID NO: 7938 - DNA, 25 bp, synthetic construct
  source 1..25: mol_type = other DNA; mol_type = other DNA
agaacaaggaggaacaggaaaacca

SEQ ID NO: 7939 - DNA, 25 bp, synthetic construct
  source 1..25: mol_type = other DNA; mol_type = other DNA
cagaacaaggaggaacaggagagcc

SEQ ID NO: 7940 - DNA, 25 bp, synthetic construct
  source 1..25: mol_type = other DNA; mol_type = other DNA
cagaacaaggaggaacaggagaacc

SEQ ID NO: 7941 - DNA, 25 bp, synthetic construct
  source 1..25: mol_type = other DNA; mol_type = other DNA
cagaacaaggaggaacaggaaaacc

SEQ ID NO: 7942 - DNA, 25 bp, synthetic construct
  source 1..25: mol_type = other DNA; mol_type = other DNA
acagaacaaggaggaacaggagaac

SEQ ID NO: 7943 - DNA, 25 bp, synthetic construct
  source 1..25: mol_type = other DNA; mol_type = other DNA
acagaacaaggaggaacaggaaaac

SEQ ID NO: 7944 - DNA, 25 bp, synthetic construct
  source 1..25: mol_type = other DNA; mol_type = other DNA
aaacacagcatttgcattttgcttt

SEQ ID NO: 7945 - DNA, 25 bp, synthetic construct
  source 1..25: mol_type = other DNA; mol_type = other DNA
aaacacagcatttgcattttacttt

SEQ ID NO: 7946 - DNA, 25 bp, synthetic construct
  source 1..25: mol_type = other DNA; mol_type = other DNA
aaacacagcatttacattttacttt

SEQ ID NO: 7947 - DNA, 25 bp, synthetic construct
  source 1..25: mol_type = other DNA; mol_type = other DNA
aaaacacagcatttgcattttactt

SEQ ID NO: 7948 - DNA, 25 bp, synthetic construct
  source 1..25: mol_type = other DNA; mol_type = other DNA
aaaacacagcatttacattttactt

SEQ ID NO: 7949 - DNA, 25 bp, synthetic construct
  source 1..25: mol_type = other DNA; mol_type = other DNA
caaaacacagcatttgcattttgct

SEQ ID NO: 7950 - DNA, 25 bp, synthetic construct
  source 1..25: mol_type = other DNA; mol_type = other DNA
caaaacacagcatttgcattttact

SEQ ID NO: 7951 - DNA, 25 bp, synthetic construct
  source 1..25: mol_type = other DNA; mol_type = other DNA
caaaacacagcatttacattttact

SEQ ID NO: 7952 - DNA, 25 bp, synthetic construct
  source 1..25: mol_type = other DNA; mol_type = other DNA
acaaaacacagcatttgcattttgc

SEQ ID NO: 7953 - DNA, 25 bp, synthetic construct
  source 1..25: mol_type = other DNA; mol_type = other DNA
acaaaacacagcatttgcattttac

SEQ ID NO: 7954 - DNA, 25 bp, synthetic construct
  source 1..25: mol_type = other DNA; mol_type = other DNA
acaaaacacagcatttacattttac

SEQ ID NO: 7955 - DNA, 25 bp, synthetic construct
  source 1..25: mol_type = other DNA; mol_type = other DNA
cacaaaacacagcatttgcatttta

SEQ ID NO: 7956 - DNA, 25 bp, synthetic construct
  source 1..25: mol_type = other DNA; mol_type = other DNA
cacaaaacacagcatttacatttta

SEQ ID NO: 7957 - DNA, 25 bp, synthetic construct
  source 1..25: mol_type = other DNA; mol_type = other DNA
tcacaaaacacagcatttgcatttt

SEQ ID NO: 7958 - DNA, 25 bp, synthetic construct
  source 1..25: mol_type = other DNA; mol_type = other DNA
tcacaaaacacagcatttacatttt

SEQ ID NO: 7959 - DNA, 25 bp, synthetic construct
  source 1..25: mol_type = other DNA; mol_type = other DNA
tcacaaaacacaacatttacatttt

SEQ ID NO: 7960 - DNA, 25 bp, synthetic construct
  source 1..25: mol_type = other DNA; mol_type = other DNA
atcacaaaacacagcatttgcattt

SEQ ID NO: 7961 - DNA, 25 bp, synthetic construct
  source 1..25: mol_type = other DNA; mol_type = other DNA
atcacaaaacacagcatttacattt

SEQ ID NO: 7962 - DNA, 25 bp, synthetic construct
  source 1..25: mol_type = other DNA; mol_type = other DNA
atcacaaaacacaacatttacattt

SEQ ID NO: 7963 - DNA, 25 bp, synthetic construct
  source 1..25: mol_type = other DNA; mol_type = other DNA
aatcacaaaacacagcatttacatt

SEQ ID NO: 7964 - DNA, 25 bp, synthetic construct
  source 1..25: mol_type = other DNA; mol_type = other DNA
aatcacaaaacacaacatttacatt

SEQ ID NO: 7965 - DNA, 25 bp, synthetic construct
  source 1..25: mol_type = other DNA; mol_type = other DNA
aaatcacaaaacacagcatttgcat

SEQ ID NO: 7966 - DNA, 25 bp, synthetic construct
  source 1..25: mol_type = other DNA; mol_type = other DNA
aaatcacaaaacacagcatttacat

SEQ ID NO: 7967 - DNA, 25 bp, synthetic construct
  source 1..25: mol_type = other DNA; mol_type = other DNA
aaatcacaaaacacaacatttacat

SEQ ID NO: 7968 - DNA, 25 bp, synthetic construct
  source 1..25: mol_type = other DNA; mol_type = other DNA
caaatcacaaaacacagcatttgca

SEQ ID NO: 7969 - DNA, 25 bp, synthetic construct
  source 1..25: mol_type = other DNA; mol_type = other DNA
caaatcacaaaacacagcatttaca

SEQ ID NO: 7970 - DNA, 25 bp, synthetic construct
  source 1..25: mol_type = other DNA; mol_type = other DNA
caaatcacaaaacacaacatttaca

SEQ ID NO: 7971 - DNA, 25 bp, synthetic construct
  source 1..25: mol_type = other DNA; mol_type = other DNA
tcaaatcacaaaacacagcatttac

SEQ ID NO: 7972 - DNA, 25 bp, synthetic construct
  source 1..25: mol_type = other DNA; mol_type = other DNA
tcaaatcacaaaacacaacatttac

SEQ ID NO: 7973 - DNA, 25 bp, synthetic construct
  source 1..25: mol_type = other DNA; mol_type = other DNA
ctcaaatcacaaaacacagcatttg

SEQ ID NO: 7974 - DNA, 25 bp, synthetic construct
  source 1..25: mol_type = other DNA; mol_type = other DNA
ctcaaatcacaaaacacagcattta

SEQ ID NO: 7975 - DNA, 25 bp, synthetic construct
  source 1..25: mol_type = other DNA; mol_type = other DNA
ctcaaatcacaaaacacaacattta

SEQ ID NO: 7976 - DNA, 25 bp, synthetic construct
  source 1..25: mol_type = other DNA; mol_type = other DNA
tctcaaatcacaaaacacagcattt

SEQ ID NO: 7977 - DNA, 25 bp, synthetic construct
  source 1..25: mol_type = other DNA; mol_type = other DNA
tctcaaatcacaaaacacaacattt

SEQ ID NO: 7978 - DNA, 25 bp, synthetic construct
  source 1..25: mol_type = other DNA; mol_type = other DNA
atctcaaatcacaaaacacaacatt

SEQ ID NO: 7979 - DNA, 25 bp, synthetic construct
  source 1..25: mol_type = other DNA; mol_type = other DNA
gatctcaaatcacaaaacacagcat

SEQ ID NO: 7980 - DNA, 25 bp, synthetic construct
  source 1..25: mol_type = other DNA; mol_type = other DNA
gatctcaaatcacaaaacacaacat

SEQ ID NO: 7981 - DNA, 25 bp, synthetic construct
  source 1..25: mol_type = other DNA; mol_type = other DNA
aatctcaaatcacaaaacacaacat

SEQ ID NO: 7982 - DNA, 25 bp, synthetic construct
  source 1..25: mol_type = other DNA; mol_type = other DNA
agatctcaaatcacaaaacacagca

SEQ ID NO: 7983 - DNA, 25 bp, synthetic construct
  source 1..25: mol_type = other DNA; mol_type = other DNA
agatctcaaatcacaaaacacaaca

SEQ ID NO: 7984 - DNA, 25 bp, synthetic construct
  source 1..25: mol_type = other DNA; mol_type = other DNA
aaatctcaaatcacaaaacacaaca

SEQ ID NO: 7985 - DNA, 25 bp, synthetic construct
  source 1..25: mol_type = other DNA; mol_type = other DNA
tagatctcaaatcacaaaacacaac

SEQ ID NO: 7986 - DNA, 25 bp, synthetic construct
  source 1..25: mol_type = other DNA; mol_type = other DNA
taaatctcaaatcacaaaacacaac

SEQ ID NO: 7987 - DNA, 25 bp, synthetic construct
  source 1..25: mol_type = other DNA; mol_type = other DNA
ctagatctcaaatcacaaaacacag

SEQ ID NO: 7988 - DNA, 25 bp, synthetic construct
  source 1..25: mol_type = other DNA; mol_type = other DNA
ctagatctcaaatcacaaaacacaa

SEQ ID NO: 7989 - DNA, 25 bp, synthetic construct
  source 1..25: mol_type = other DNA; mol_type = other DNA
ctaaatctcaaatcacaaaacacaa

SEQ ID NO: 7990 - DNA, 25 bp, synthetic construct
  source 1..25: mol_type = other DNA; mol_type = other DNA
cctagatctcaaatcacaaaacaca

SEQ ID NO: 7991 - DNA, 25 bp, synthetic construct
  source 1..25: mol_type = other DNA; mol_type = other DNA
cctaaatctcaaatcacaaaacaca

SEQ ID NO: 7992 - DNA, 25 bp, synthetic construct
  source 1..25: mol_type = other DNA; mol_type = other DNA
ccctaaatctcaaatcacaaaacac

SEQ ID NO: 7993 - DNA, 25 bp, synthetic construct
  source 1..25: mol_type = other DNA; mol_type = other DNA
tccctagatctcaaatcacaaaaca

SEQ ID NO: 7994 - DNA, 25 bp, synthetic construct
  source 1..25: mol_type = other DNA; mol_type = other DNA
tccctaaatctcaaatcacaaaaca

SEQ ID NO: 7995 - DNA, 25 bp, synthetic construct
  source 1..25: mol_type = other DNA; mol_type = other DNA
ctccctagatctcaaatcacaaaac

SEQ ID NO: 7996 - DNA, 25 bp, synthetic construct
  source 1..25: mol_type = other DNA; mol_type = other DNA
ctccctaaatctcaaatcacaaaac

SEQ ID NO: 7997 - DNA, 25 bp, synthetic construct
  source 1..25: mol_type = other DNA; mol_type = other DNA
cctccctaaatctcaaatcacaaaa

SEQ ID NO: 7998 - DNA, 25 bp, synthetic construct
  source 1..25: mol_type = other DNA; mol_type = other DNA
acctccctagatctcaaatcacaaa

SEQ ID NO: 7999 - DNA, 25 bp, synthetic construct
  source 1..25: mol_type = other DNA; mol_type = other DNA
acctccctaaatctcaaatcacaaa

SEQ ID NO: 8000 - DNA, 25 bp, synthetic construct
  source 1..25: mol_type = other DNA; mol_type = other DNA
cacctccctagatctcaaatcacaa

SEQ ID NO: 8001 - DNA, 25 bp, synthetic construct
  source 1..25: mol_type = other DNA; mol_type = other DNA
cacctccctaaatctcaaatcacaa

SEQ ID NO: 8002 - DNA, 25 bp, synthetic construct
  source 1..25: mol_type = other DNA; mol_type = other DNA
ccacctccctaaatctcaaatcaca

SEQ ID NO: 8003 - DNA, 25 bp, synthetic construct
  source 1..25: mol_type = other DNA; mol_type = other DNA
gccacctccctagatctcaaatcac

SEQ ID NO: 8004 - DNA, 25 bp, synthetic construct
  source 1..25: mol_type = other DNA; mol_type = other DNA
gccacctccctaaatctcaaatcac

SEQ ID NO: 8005 - DNA, 25 bp, synthetic construct
  source 1..25: mol_type = other DNA; mol_type = other DNA
accacctccctaaatctcaaatcac

SEQ ID NO: 8006 - DNA, 25 bp, synthetic construct
  source 1..25: mol_type = other DNA; mol_type = other DNA
agccacctccctagatctcaaatca

SEQ ID NO: 8007 - DNA, 25 bp, synthetic construct
  source 1..25: mol_type = other DNA; mol_type = other DNA
agccacctccctaaatctcaaatca

SEQ ID NO: 8008 - DNA, 25 bp, synthetic construct
  source 1..25: mol_type = other DNA; mol_type = other DNA
aaccacctccctaaatctcaaatca

SEQ ID NO: 8009 - DNA, 25 bp, synthetic construct
  source 1..25: mol_type = other DNA; mol_type = other DNA
aagccacctccctaaatctcaaatc

SEQ ID NO: 8010 - DNA, 25 bp, synthetic construct
  source 1..25: mol_type = other DNA; mol_type = other DNA
aaaccacctccctaaatctcaaatc

SEQ ID NO: 8011 - DNA, 25 bp, synthetic construct
  source 1..25: mol_type = other DNA; mol_type = other DNA
taagccacctccctagatctcaaat

SEQ ID NO: 8012 - DNA, 25 bp, synthetic construct
  source 1..25: mol_type = other DNA; mol_type = other DNA
taagccacctccctaaatctcaaat

SEQ ID NO: 8013 - DNA, 25 bp, synthetic construct
  source 1..25: mol_type = other DNA; mol_type = other DNA
taaaccacctccctaaatctcaaat

SEQ ID NO: 8014 - DNA, 25 bp, synthetic construct
  source 1..25: mol_type = other DNA; mol_type = other DNA
ctaagccacctccctagatctcaaa

SEQ ID NO: 8015 - DNA, 25 bp, synthetic construct
  source 1..25: mol_type = other DNA; mol_type = other DNA
ctaagccacctccctaaatctcaaa

SEQ ID NO: 8016 - DNA, 25 bp, synthetic construct
  source 1..25: mol_type = other DNA; mol_type = other DNA
ctaaaccacctccctaaatctcaaa

SEQ ID NO: 8017 - DNA, 25 bp, synthetic construct
  source 1..25: mol_type = other DNA; mol_type = other DNA
cctaagccacctccctaaatctcaa

SEQ ID NO: 8018 - DNA, 25 bp, synthetic construct
  source 1..25: mol_type = other DNA; mol_type = other DNA
cctaaaccacctccctaaatctcaa

SEQ ID NO: 8019 - DNA, 25 bp, synthetic construct
  source 1..25: mol_type = other DNA; mol_type = other DNA
tcctaagccacctccctagatctca

SEQ ID NO: 8020 - DNA, 25 bp, synthetic construct
  source 1..25: mol_type = other DNA; mol_type = other DNA
tcctaagccacctccctaaatctca

SEQ ID NO: 8021 - DNA, 25 bp, synthetic construct
  source 1..25: mol_type = other DNA; mol_type = other DNA
tcctaaaccacctccctaaatctca

SEQ ID NO: 8022 - DNA, 25 bp, synthetic construct
  source 1..25: mol_type = other DNA; mol_type = other DNA
gtcctaagccacctccctagatctc

SEQ ID NO: 8023 - DNA, 25 bp, synthetic construct
  source 1..25: mol_type = other DNA; mol_type = other DNA
gtcctaagccacctccctaaatctc

SEQ ID NO: 8024 - DNA, 25 bp, synthetic construct
  source 1..25: mol_type = other DNA; mol_type = other DNA
gtcctaaaccacctccctaaatctc

SEQ ID NO: 8025 - DNA, 25 bp, synthetic construct
  source 1..25: mol_type = other DNA; mol_type = other DNA
tgtcctaagccacctccctaaatct

SEQ ID NO: 8026 - DNA, 25 bp, synthetic construct
  source 1..25: mol_type = other DNA; mol_type = other DNA
tgtcctaaaccacctccctaaatct

SEQ ID NO: 8027 - DNA, 25 bp, synthetic construct
  source 1..25: mol_type = other DNA; mol_type = other DNA
ttgtcctaagccacctccctagatc

SEQ ID NO: 8028 - DNA, 25 bp, synthetic construct
  source 1..25: mol_type = other DNA; mol_type = other DNA
ttgtcctaagccacctccctaaatc

SEQ ID NO: 8029 - DNA, 25 bp, synthetic construct
  source 1..25: mol_type = other DNA; mol_type = other DNA
ttgtcctaaaccacctccctaaatc

SEQ ID NO: 8030 - DNA, 25 bp, synthetic construct
  source 1..25: mol_type = other DNA; mol_type = other DNA
tttgtcctaagccacctccctagat

SEQ ID NO: 8031 - DNA, 25 bp, synthetic construct
  source 1..25: mol_type = other DNA; mol_type = other DNA
tttgtcctaagccacctccctaaat

SEQ ID NO: 8032 - DNA, 25 bp, synthetic construct
  source 1..25: mol_type = other DNA; mol_type = other DNA
tttgtcctaaaccacctccctaaat

SEQ ID NO: 8033 - DNA, 25 bp, synthetic construct
  source 1..25: mol_type = other DNA; mol_type = other DNA
ttttgtcctaagccacctccctaaa

SEQ ID NO: 8034 - DNA, 25 bp, synthetic construct
  source 1..25: mol_type = other DNA; mol_type = other DNA
ttttgtcctaaaccacctccctaaa

SEQ ID NO: 8035 - DNA, 25 bp, synthetic construct
  source 1..25: mol_type = other DNA; mol_type = other DNA
tttttgtcctaagccacctccctag

SEQ ID NO: 8036 - DNA, 25 bp, synthetic construct
  source 1..25: mol_type = other DNA; mol_type = other DNA
tttttgtcctaagccacctccctaa

SEQ ID NO: 8037 - DNA, 25 bp, synthetic construct
  source 1..25: mol_type = other DNA; mol_type = other DNA
tttttgtcctaaaccacctccctaa

SEQ ID NO: 8038 - DNA, 25 bp, synthetic construct
  source 1..25: mol_type = other DNA; mol_type = other DNA
gtttttgtcctaagccacctcccta

SEQ ID NO: 8039 - DNA, 25 bp, synthetic construct
  source 1..25: mol_type = other DNA; mol_type = other DNA
gtttttgtcctaaaccacctcccta

SEQ ID NO: 8040 - DNA, 25 bp, synthetic construct
  source 1..25: mol_type = other DNA; mol_type = other DNA
gtttttatcctaaaccacctcccta

SEQ ID NO: 8041 - DNA, 25 bp, synthetic construct
  source 1..25: mol_type = other DNA; mol_type = other DNA
ggtttttgtcctaaaccacctccct

SEQ ID NO: 8042 - DNA, 25 bp, synthetic construct
  source 1..25: mol_type = other DNA; mol_type = other DNA
ggtttttatcctaaaccacctccct

SEQ ID NO: 8043 - DNA, 25 bp, synthetic construct
  source 1..25: mol_type = other DNA; mol_type = other DNA
gggtttttgtcctaagccacctccc

SEQ ID NO: 8044 - DNA, 25 bp, synthetic construct
  source 1..25: mol_type = other DNA; mol_type = other DNA
gggtttttgtcctaaaccacctccc

SEQ ID NO: 8045 - DNA, 25 bp, synthetic construct
  source 1..25: mol_type = other DNA; mol_type = other DNA
gggtttttatcctaaaccacctccc

SEQ ID NO: 8046 - DNA, 25 bp, synthetic construct
  source 1..25: mol_type = other DNA; mol_type = other DNA
tgggtttttgtcctaagccacctcc

SEQ ID NO: 8047 - DNA, 25 bp, synthetic construct
  source 1..25: mol_type = other DNA; mol_type = other DNA
tgggtttttgtcctaaaccacctcc

SEQ ID NO: 8048 - DNA, 25 bp, synthetic construct
  source 1..25: mol_type = other DNA; mol_type = other DNA
tgggtttttatcctaaaccacctcc

SEQ ID NO: 8049 - DNA, 25 bp, synthetic construct
  source 1..25: mol_type = other DNA; mol_type = other DNA
gtgggtttttgtcctaaaccacctc

SEQ ID NO: 8050 - DNA, 25 bp, synthetic construct
  source 1..25: mol_type = other DNA; mol_type = other DNA
gtgggtttttatcctaaaccacctc

SEQ ID NO: 8051 - DNA, 25 bp, synthetic construct
  source 1..25: mol_type = other DNA; mol_type = other DNA
tgtgggtttttgtcctaagccacct

SEQ ID NO: 8052 - DNA, 25 bp, synthetic construct
  source 1..25: mol_type = other DNA; mol_type = other DNA
tgtgggtttttgtcctaaaccacct

SEQ ID NO: 8053 - DNA, 25 bp, synthetic construct
  source 1..25: mol_type = other DNA; mol_type = other DNA
tgtgggtttttatcctaaaccacct

SEQ ID NO: 8054 - DNA, 25 bp, synthetic construct
  source 1..25: mol_type = other DNA; mol_type = other DNA
ctgtgggtttttgtcctaagccacc

SEQ ID NO: 8055 - DNA, 25 bp, synthetic construct
  source 1..25: mol_type = other DNA; mol_type = other DNA
ctgtgggtttttgtcctaaaccacc

SEQ ID NO: 8056 - DNA, 25 bp, synthetic construct
  source 1..25: mol_type = other DNA; mol_type = other DNA
ctgtgggtttttatcctaaaccacc

SEQ ID NO: 8057 - DNA, 25 bp, synthetic construct
  source 1..25: mol_type = other DNA; mol_type = other DNA
tctgtgggtttttgtcctaaaccac

SEQ ID NO: 8058 - DNA, 25 bp, synthetic construct
  source 1..25: mol_type = other DNA; mol_type = other DNA
tctgtgggtttttatcctaaaccac

SEQ ID NO: 8059 - DNA, 25 bp, synthetic construct
  source 1..25: mol_type = other DNA; mol_type = other DNA
ttctgtgggtttttgtcctaagcca

SEQ ID NO: 8060 - DNA, 25 bp, synthetic construct
  source 1..25: mol_type = other DNA; mol_type = other DNA
ttctgtgggtttttgtcctaaacca

SEQ ID NO: 8061 - DNA, 25 bp, synthetic construct
  source 1..25: mol_type = other DNA; mol_type = other DNA
ttctgtgggtttttatcctaaacca

SEQ ID NO: 8062 - DNA, 25 bp, synthetic construct
  source 1..25: mol_type = other DNA; mol_type = other DNA
cttctgtgggtttttgtcctaagcc

SEQ ID NO: 8063 - DNA, 25 bp, synthetic construct
  source 1..25: mol_type = other DNA; mol_type = other DNA
cttctgtgggtttttgtcctaaacc

SEQ ID NO: 8064 - DNA, 25 bp, synthetic construct
  source 1..25: mol_type = other DNA; mol_type = other DNA
cttctgtgggtttttatcctaaacc

SEQ ID NO: 8065 - DNA, 25 bp, synthetic construct
  source 1..25: mol_type = other DNA; mol_type = other DNA
ccttctgtgggtttttgtcctaaac

SEQ ID NO: 8066 - DNA, 25 bp, synthetic construct
  source 1..25: mol_type = other DNA; mol_type = other DNA
ccttctgtgggtttttatcctaaac

SEQ ID NO: 8067 - DNA, 25 bp, synthetic construct
  source 1..25: mol_type = other DNA; mol_type = other DNA
tccttctgtgggtttttgtcctaag

SEQ ID NO: 8068 - DNA, 25 bp, synthetic construct
  source 1..25: mol_type = other DNA; mol_type = other DNA
tccttctgtgggtttttgtcctaaa

SEQ ID NO: 8069 - DNA, 25 bp, synthetic construct
  source 1..25: mol_type = other DNA; mol_type = other DNA
tccttctgtgggtttttatcctaaa

SEQ ID NO: 8070 - DNA, 25 bp, synthetic construct
  source 1..25: mol_type = other DNA; mol_type = other DNA
gtccttctgtgggtttttgtcctaa

SEQ ID NO: 8071 - DNA, 25 bp, synthetic construct
  source 1..25: mol_type = other DNA; mol_type = other DNA
gtccttctgtgggtttttatcctaa

SEQ ID NO: 8072 - DNA, 25 bp, synthetic construct
  source 1..25: mol_type = other DNA; mol_type = other DNA
gtccttctgtggatttttatcctaa

SEQ ID NO: 8073 - DNA, 25 bp, synthetic construct
  source 1..25: mol_type = other DNA; mol_type = other DNA
agtccttctgtgggtttttatccta

SEQ ID NO: 8074 - DNA, 25 bp, synthetic construct
  source 1..25: mol_type = other DNA; mol_type = other DNA
agtccttctgtggatttttatccta

SEQ ID NO: 8075 - DNA, 25 bp, synthetic construct
  source 1..25: mol_type = other DNA; mol_type = other DNA
aagtccttctgtgggtttttgtcct

SEQ ID NO: 8076 - DNA, 25 bp, synthetic construct
  source 1..25: mol_type = other DNA; mol_type = other DNA
aagtccttctgtgggtttttatcct

SEQ ID NO: 8077 - DNA, 25 bp, synthetic construct
  source 1..25: mol_type = other DNA; mol_type = other DNA
aagtccttctgtggatttttatcct

SEQ ID NO: 8078 - DNA, 25 bp, synthetic construct
  source 1..25: mol_type = other DNA; mol_type = other DNA
taagtccttctgtgggtttttgtcc

SEQ ID NO: 8079 - DNA, 25 bp, synthetic construct
  source 1..25: mol_type = other DNA; mol_type = other DNA
taagtccttctgtgggtttttatcc

SEQ ID NO: 8080 - DNA, 25 bp, synthetic construct
  source 1..25: mol_type = other DNA; mol_type = other DNA
taagtccttctgtggatttttatcc

SEQ ID NO: 8081 - DNA, 25 bp, synthetic construct
  source 1..25: mol_type = other DNA; mol_type = other DNA
gtaagtccttctgtgggtttttatc

SEQ ID NO: 8082 - DNA, 25 bp, synthetic construct
  source 1..25: mol_type = other DNA; mol_type = other DNA
gtaagtccttctgtggatttttatc

SEQ ID NO: 8083 - DNA, 25 bp, synthetic construct
  source 1..25: mol_type = other DNA; mol_type = other DNA
agtaagtccttctgtgggtttttgt

SEQ ID NO: 8084 - DNA, 25 bp, synthetic construct
  source 1..25: mol_type = other DNA; mol_type = other DNA
agtaagtccttctgtgggtttttat

SEQ ID NO: 8085 - DNA, 25 bp, synthetic construct
  source 1..25: mol_type = other DNA; mol_type = other DNA
agtaagtccttctgtggatttttat

SEQ ID NO: 8086 - DNA, 25 bp, synthetic construct
  source 1..25: mol_type = other DNA; mol_type = other DNA
gagtaagtccttctgtgggtttttg

SEQ ID NO: 8087 - DNA, 25 bp, synthetic construct
  source 1..25: mol_type = other DNA; mol_type = other DNA
gagtaagtccttctgtgggttttta

SEQ ID NO: 8088 - DNA, 25 bp, synthetic construct
  source 1..25: mol_type = other DNA; mol_type = other DNA
gagtaagtccttctgtggattttta

SEQ ID NO: 8089 - DNA, 25 bp, synthetic construct
  source 1..25: mol_type = other DNA; mol_type = other DNA
tgagtaagtccttctgtggattttt

SEQ ID NO: 8090 - DNA, 25 bp, synthetic construct
  source 1..25: mol_type = other DNA; mol_type = other DNA
tgagtaagtccttctgtgaattttt

SEQ ID NO: 8091 - DNA, 25 bp, synthetic construct
  source 1..25: mol_type = other DNA; mol_type = other DNA
ctgagtaagtccttctgtgggtttt

SEQ ID NO: 8092 - DNA, 25 bp, synthetic construct
  source 1..25: mol_type = other DNA; mol_type = other DNA
ctgagtaagtccttctgtggatttt

SEQ ID NO: 8093 - DNA, 25 bp, synthetic construct
  source 1..25: mol_type = other DNA; mol_type = other DNA
ctgagtaagtccttctgtgaatttt

SEQ ID NO: 8094 - DNA, 25 bp, synthetic construct
  source 1..25: mol_type = other DNA; mol_type = other DNA
gctgagtaagtccttctgtgggttt

SEQ ID NO: 8095 - DNA, 25 bp, synthetic construct
  source 1..25: mol_type = other DNA; mol_type = other DNA
gctgagtaagtccttctgtggattt

SEQ ID NO: 8096 - DNA, 25 bp, synthetic construct
  source 1..25: mol_type = other DNA; mol_type = other DNA
gctgagtaagtccttctgtgaattt

SEQ ID NO: 8097 - DNA, 25 bp, synthetic construct
  source 1..25: mol_type = other DNA; mol_type = other DNA
cgctgagtaagtccttctgtggatt

SEQ ID NO: 8098 - DNA, 25 bp, synthetic construct
  source 1..25: mol_type = other DNA; mol_type = other DNA
cgctgagtaagtccttctgtgaatt

SEQ ID NO: 8099 - DNA, 25 bp, synthetic construct
  source 1..25: mol_type = other DNA; mol_type = other DNA
acgctgagtaagtccttctgtgggt

SEQ ID NO: 8100 - DNA, 25 bp, synthetic construct
  source 1..25: mol_type = other DNA; mol_type = other DNA
acgctgagtaagtccttctgtggat

SEQ ID NO: 8101 - DNA, 25 bp, synthetic construct
  source 1..25: mol_type = other DNA; mol_type = other DNA
acgctgagtaagtccttctgtgaat

SEQ ID NO: 8102 - DNA, 25 bp, synthetic construct
  source 1..25: mol_type = other DNA; mol_type = other DNA
aacgctgagtaagtccttctgtggg

SEQ ID NO: 8103 - DNA, 25 bp, synthetic construct
  source 1..25: mol_type = other DNA; mol_type = other DNA
aacgctgagtaagtccttctgtgga

SEQ ID NO: 8104 - DNA, 25 bp, synthetic construct
  source 1..25: mol_type = other DNA; mol_type = other DNA
aacgctgagtaagtccttctgtgaa

SEQ ID NO: 8105 - DNA, 25 bp, synthetic construct
  source 1..25: mol_type = other DNA; mol_type = other DNA
gaacgctgagtaagtccttctgtga

SEQ ID NO: 8106 - DNA, 25 bp, synthetic construct
  source 1..25: mol_type = other DNA; mol_type = other DNA
gaacgctgagtaagtccttctgtaa

SEQ ID NO: 8107 - DNA, 25 bp, synthetic construct
  source 1..25: mol_type = other DNA; mol_type = other DNA
tgaacgctgagtaagtccttctgtg

SEQ ID NO: 8108 - DNA, 25 bp, synthetic construct
  source 1..25: mol_type = other DNA; mol_type = other DNA
tgaacgctgagtaagtccttctgta

SEQ ID NO: 8109 - DNA, 25 bp, synthetic construct
  source 1..25: mol_type = other DNA; mol_type = other DNA
tgaacgctgagtaagtccttctata

SEQ ID NO: 8110 - DNA, 25 bp, synthetic construct
  source 1..25: mol_type = other DNA; mol_type = other DNA
ctgaacgctgagtaagtccttctgt

SEQ ID NO: 8111 - DNA, 25 bp, synthetic construct
  source 1..25: mol_type = other DNA; mol_type = other DNA
ctgaacgctgagtaagtccttctat

SEQ ID NO: 8112 - DNA, 25 bp, synthetic construct
  source 1..25: mol_type = other DNA; mol_type = other DNA
ctgaacgctgagtaaatccttctat

SEQ ID NO: 8113 - DNA, 25 bp, synthetic construct
  source 1..25: mol_type = other DNA; mol_type = other DNA
tctgaacgctgagtaagtccttcta

SEQ ID NO: 8114 - DNA, 25 bp, synthetic construct
  source 1..25: mol_type = other DNA; mol_type = other DNA
tctgaacgctgagtaaatccttcta

SEQ ID NO: 8115 - DNA, 25 bp, synthetic construct
  source 1..25: mol_type = other DNA; mol_type = other DNA
gtctgaacgctgagtaagtccttct

SEQ ID NO: 8116 - DNA, 25 bp, synthetic construct
  source 1..25: mol_type = other DNA; mol_type = other DNA
gtctgaacgctgagtaaatccttct

SEQ ID NO: 8117 - DNA, 25 bp, synthetic construct
  source 1..25: mol_type = other DNA; mol_type = other DNA
gtctgaacgctgaataaatccttct

SEQ ID NO: 8118 - DNA, 25 bp, synthetic construct
  source 1..25: mol_type = other DNA; mol_type = other DNA
agtctgaacgctgagtaagtccttc

SEQ ID NO: 8119 - DNA, 25 bp, synthetic construct
  source 1..25: mol_type = other DNA; mol_type = other DNA
agtctgaacgctgagtaaatccttc

SEQ ID NO: 8120 - DNA, 25 bp, synthetic construct
  source 1..25: mol_type = other DNA; mol_type = other DNA
agtctgaacgctgaataaatccttc

SEQ ID NO: 8121 - DNA, 25 bp, synthetic construct
  source 1..25: mol_type = other DNA; mol_type = other DNA
gagtctgaacgctgagtaaatcctt

SEQ ID NO: 8122 - DNA, 25 bp, synthetic construct
  source 1..25: mol_type = other DNA; mol_type = other DNA
gagtctgaacgctgaataaatcctt

SEQ ID NO: 8123 - DNA, 25 bp, synthetic construct
  source 1..25: mol_type = other DNA; mol_type = other DNA
tgagtctgaacgctgagtaagtcct

SEQ ID NO: 8124 - DNA, 25 bp, synthetic construct
  source 1..25: mol_type = other DNA; mol_type = other DNA
tgagtctgaacgctgagtaaatcct

SEQ ID NO: 8125 - DNA, 25 bp, synthetic construct
  source 1..25: mol_type = other DNA; mol_type = other DNA
tgagtctgaacgctgaataaatcct

SEQ ID NO: 8126 - DNA, 25 bp, synthetic construct
  source 1..25: mol_type = other DNA; mol_type = other DNA
atgagtctgaacgctgagtaagtcc

SEQ ID NO: 8127 - DNA, 25 bp, synthetic construct
  source 1..25: mol_type = other DNA; mol_type = other DNA
atgagtctgaacgctgagtaaatcc

SEQ ID NO: 8128 - DNA, 25 bp, synthetic construct
  source 1..25: mol_type = other DNA; mol_type = other DNA
atgagtctgaacgctgaataaatcc

SEQ ID NO: 8129 - DNA, 25 bp, synthetic construct
  source 1..25: mol_type = other DNA; mol_type = other DNA
gatgagtctgaacgctgagtaaatc

SEQ ID NO: 8130 - DNA, 25 bp, synthetic construct
  source 1..25: mol_type = other DNA; mol_type = other DNA
gatgagtctgaacgctgaataaatc

SEQ ID NO: 8131 - DNA, 25 bp, synthetic construct
  source 1..25: mol_type = other DNA; mol_type = other DNA
tgatgagtctgaacgctgagtaagt

SEQ ID NO: 8132 - DNA, 25 bp, synthetic construct
  source 1..25: mol_type = other DNA; mol_type = other DNA
tgatgagtctgaacgctgagtaaat

SEQ ID NO: 8133 - DNA, 25 bp, synthetic construct
  source 1..25: mol_type = other DNA; mol_type = other DNA
tgatgagtctgaacgctgaataaat

SEQ ID NO: 8134 - DNA, 25 bp, synthetic construct
  source 1..25: mol_type = other DNA; mol_type = other DNA
ctgatgagtctgaacgctgagtaag

SEQ ID NO: 8135 - DNA, 25 bp, synthetic construct
  source 1..25: mol_type = other DNA; mol_type = other DNA
ctgatgagtctgaacgctgagtaaa

SEQ ID NO: 8136 - DNA, 25 bp, synthetic construct
  source 1..25: mol_type = other DNA; mol_type = other DNA
ctgatgagtctgaacgctgaataaa

SEQ ID NO: 8137 - DNA, 25 bp, synthetic construct
  source 1..25: mol_type = other DNA; mol_type = other DNA
cctgatgagtctgaacgctgaataa

SEQ ID NO: 8138 - DNA, 25 bp, synthetic construct
  source 1..25: mol_type = other DNA; mol_type = other DNA
cctgatgagtctgaacgctaaataa

SEQ ID NO: 8139 - DNA, 25 bp, synthetic construct
  source 1..25: mol_type = other DNA; mol_type = other DNA
acctgatgagtctgaacgctgagta

SEQ ID NO: 8140 - DNA, 25 bp, synthetic construct
  source 1..25: mol_type = other DNA; mol_type = other DNA
acctgatgagtctgaacgctgaata

SEQ ID NO: 8141 - DNA, 25 bp, synthetic construct
  source 1..25: mol_type = other DNA; mol_type = other DNA
acctgatgagtctgaacgctaaata

SEQ ID NO: 8142 - DNA, 25 bp, synthetic construct
  source 1..25: mol_type = other DNA; mol_type = other DNA
cacctgatgagtctgaacgctgagt

SEQ ID NO: 8143 - DNA, 25 bp, synthetic construct
  source 1..25: mol_type = other DNA; mol_type = other DNA
cacctgatgagtctgaacgctgaat

SEQ ID NO: 8144 - DNA, 25 bp, synthetic construct
  source 1..25: mol_type = other DNA; mol_type = other DNA
cacctgatgagtctgaacgctaaat

SEQ ID NO: 8145 - DNA, 25 bp, synthetic construct
  source 1..25: mol_type = other DNA; mol_type = other DNA
acacctgatgagtctgaacgctgaa

SEQ ID NO: 8146 - DNA, 25 bp, synthetic construct
  source 1..25: mol_type = other DNA; mol_type = other DNA
acacctgatgagtctgaacgctaaa

SEQ ID NO: 8147 - DNA, 25 bp, synthetic construct
  source 1..25: mol_type = other DNA; mol_type = other DNA
gacacctgatgagtctgaacgctga

SEQ ID NO: 8148 - DNA, 25 bp, synthetic construct
  source 1..25: mol_type = other DNA; mol_type = other DNA
gacacctgatgagtctgaacgctaa

SEQ ID NO: 8149 - DNA, 25 bp, synthetic construct
  source 1..25: mol_type = other DNA; mol_type = other DNA
gacacctgatgagtctgaacactaa

SEQ ID NO: 8150 - DNA, 25 bp, synthetic construct
  source 1..25: mol_type = other DNA; mol_type = other DNA
cgacacctgatgagtctgaacgctg

SEQ ID NO: 8151 - DNA, 25 bp, synthetic construct
  source 1..25: mol_type = other DNA; mol_type = other DNA
cgacacctgatgagtctgaacgcta

SEQ ID NO: 8152 - DNA, 25 bp, synthetic construct
  source 1..25: mol_type = other DNA; mol_type = other DNA
cgacacctgatgagtctgaacacta

SEQ ID NO: 8153 - DNA, 25 bp, synthetic construct
  source 1..25: mol_type = other DNA; mol_type = other DNA
tcgacacctgatgagtctgaacact

SEQ ID NO: 8154 - DNA, 25 bp, synthetic construct
  source 1..25: mol_type = other DNA; mol_type = other DNA
tcgacacctgatgagtctaaacact

SEQ ID NO: 8155 - DNA, 25 bp, synthetic construct
  source 1..25: mol_type = other DNA; mol_type = other DNA
atcgacacctgatgagtctgaacac

SEQ ID NO: 8156 - DNA, 25 bp, synthetic construct
  source 1..25: mol_type = other DNA; mol_type = other DNA
atcgacacctgatgagtctaaacac

SEQ ID NO: 8157 - DNA, 25 bp, synthetic construct
  source 1..25: mol_type = other DNA; mol_type = other DNA
gatcgacacctgatgagtctgaacg

SEQ ID NO: 8158 - DNA, 25 bp, synthetic construct
  source 1..25: mol_type = other DNA; mol_type = other DNA
gatcgacacctgatgagtctgaaca

SEQ ID NO: 8159 - DNA, 25 bp, synthetic construct
  source 1..25: mol_type = other DNA; mol_type = other DNA
gatcgacacctgatgagtctaaaca

SEQ ID NO: 8160 - DNA, 25 bp, synthetic construct
  source 1..25: mol_type = other DNA; mol_type = other DNA
ggatcgacacctgatgagtctaaac

SEQ ID NO: 8161 - DNA, 25 bp, synthetic construct
  source 1..25: mol_type = other DNA; mol_type = other DNA
ggatcgacacctgatgaatctaaac

SEQ ID NO: 8162 - DNA, 25 bp, synthetic construct
  source 1..25: mol_type = other DNA; mol_type = other DNA
gggatcgacacctgatgagtctgaa

SEQ ID NO: 8163 - DNA, 25 bp, synthetic construct
  source 1..25: mol_type = other DNA; mol_type = other DNA
gggatcgacacctgatgagtctaaa

SEQ ID NO: 8164 - DNA, 25 bp, synthetic construct
  source 1..25: mol_type = other DNA; mol_type = other DNA
gggatcgacacctgatgaatctaaa

SEQ ID NO: 8165 - DNA, 25 bp, synthetic construct
  source 1..25: mol_type = other DNA; mol_type = other DNA
tgggatcgacacctgatgagtctga

SEQ ID NO: 8166 - DNA, 25 bp, synthetic construct
  source 1..25: mol_type = other DNA; mol_type = other DNA
gtggatcgacacctgatgagtctga

SEQ ID NO: 8167 - DNA, 25 bp, synthetic construct
  source 1..25: mol_type = other DNA; mol_type = other DNA
gggtatcgacacctgatgagtctga

SEQ ID NO: 8168 - DNA, 25 bp, synthetic construct
  source 1..25: mol_type = other DNA; mol_type = other DNA
agagatcgacacctgatgagtctga

SEQ ID NO: 8169 - DNA, 25 bp, synthetic construct
  source 1..25: mol_type = other DNA; mol_type = other DNA
aggaatcgacacctgatgagtctga

SEQ ID NO: 8170 - DNA, 25 bp, synthetic construct
  source 1..25: mol_type = other DNA; mol_type = other DNA
gaagatcgacacctgatgagtctga

SEQ ID NO: 8171 - DNA, 25 bp, synthetic construct
  source 1..25: mol_type = other DNA; mol_type = other DNA
gagaatcgacacctgatgagtctga

SEQ ID NO: 8172 - DNA, 25 bp, synthetic construct
  source 1..25: mol_type = other DNA; mol_type = other DNA
gagggatcgacacctgatgagtctg

SEQ ID NO: 8173 - DNA, 25 bp, synthetic construct
  source 1..25: mol_type = other DNA; mol_type = other DNA
ggaggatcgacacctgatgagtctg

SEQ ID NO: 8174 - DNA, 25 bp, synthetic construct
  source 1..25: mol_type = other DNA; mol_type = other DNA
gggagatcgacacctgatgagtctg

SEQ ID NO: 8175 - DNA, 25 bp, synthetic construct
  source 1..25: mol_type = other DNA; mol_type = other DNA
agaggatcgacacctgatgagtctg

SEQ ID NO: 8176 - DNA, 25 bp, synthetic construct
  source 1..25: mol_type = other DNA; mol_type = other DNA
aggagatcgacacctgatgagtctg

SEQ ID NO: 8177 - DNA, 25 bp, synthetic construct
  source 1..25: mol_type = other DNA; mol_type = other DNA
gaaggatcgacacctgatgagtctg

SEQ ID NO: 8178 - DNA, 25 bp, synthetic construct
  source 1..25: mol_type = other DNA; mol_type = other DNA
gagagatcgacacctgatgagtctg

SEQ ID NO: 8179 - DNA, 25 bp, synthetic construct
  source 1..25: mol_type = other DNA; mol_type = other DNA
tgagggatcgacacctgatgagtct

SEQ ID NO: 8180 - DNA, 25 bp, synthetic construct
  source 1..25: mol_type = other DNA; mol_type = other DNA
tggaggatcgacacctgatgagtct

SEQ ID NO: 8181 - DNA, 25 bp, synthetic construct
  source 1..25: mol_type = other DNA; mol_type = other DNA
tgggagatcgacacctgatgagtct

SEQ ID NO: 8182 - DNA, 25 bp, synthetic construct
  source 1..25: mol_type = other DNA; mol_type = other DNA
tagaggatcgacacctgatgagtct

SEQ ID NO: 8183 - DNA, 25 bp, synthetic construct
  source 1..25: mol_type = other DNA; mol_type = other DNA
taggagatcgacacctgatgagtct

SEQ ID NO: 8184 - DNA, 25 bp, synthetic construct
  source 1..25: mol_type = other DNA; mol_type = other DNA
tgaaggatcgacacctgatgagtct

SEQ ID NO: 8185 - DNA, 25 bp, synthetic construct
  source 1..25: mol_type = other DNA; mol_type = other DNA
tgagagatcgacacctgatgagtct

SEQ ID NO: 8186 - DNA, 25 bp, synthetic construct
  source 1..25: mol_type = other DNA; mol_type = other DNA
atgtgggatcgacacctgatgagtc

SEQ ID NO: 8187 - DNA, 25 bp, synthetic construct
  source 1..25: mol_type = other DNA; mol_type = other DNA
atggtggatcgacacctgatgagtc

SEQ ID NO: 8188 - DNA, 25 bp, synthetic construct
  source 1..25: mol_type = other DNA; mol_type = other DNA
atgggtgatcgacacctgatgagtc

SEQ ID NO: 8189 - DNA, 25 bp, synthetic construct
  source 1..25: mol_type = other DNA; mol_type = other DNA
atagaggatcgacacctgatgagtc

SEQ ID NO: 8190 - DNA, 25 bp, synthetic construct
  source 1..25: mol_type = other DNA; mol_type = other DNA
ataggagatcgacacctgatgagtc

SEQ ID NO: 8191 - DNA, 25 bp, synthetic construct
  source 1..25: mol_type = other DNA; mol_type = other DNA
atgaaggatcgacacctgatgagtc

SEQ ID NO: 8192 - DNA, 25 bp, synthetic construct
  source 1..25: mol_type = other DNA; mol_type = other DNA
atgagagatcgacacctgatgagtc

SEQ ID NO: 8193 - DNA, 25 bp, synthetic construct
  source 1..25: mol_type = other DNA; mol_type = other DNA
catgtgggatcgacacctgatgagt

SEQ ID NO: 8194 - DNA, 25 bp, synthetic construct
  source 1..25: mol_type = other DNA; mol_type = other DNA
catggtggatcgacacctgatgagt

SEQ ID NO: 8195 - DNA, 25 bp, synthetic construct
  source 1..25: mol_type = other DNA; mol_type = other DNA
catgggtgatcgacacctgatgagt

SEQ ID NO: 8196 - DNA, 25 bp, synthetic construct
  source 1..25: mol_type = other DNA; mol_type = other DNA
catagaggatcgacacctgatgagt

SEQ ID NO: 8197 - DNA, 25 bp, synthetic construct
  source 1..25: mol_type = other DNA; mol_type = other DNA
cataggagatcgacacctgatgagt

SEQ ID NO: 8198 - DNA, 25 bp, synthetic construct
  source 1..25: mol_type = other DNA; mol_type = other DNA
catgaaggatcgacacctgatgagt

SEQ ID NO: 8199 - DNA, 25 bp, synthetic construct
  source 1..25: mol_type = other DNA; mol_type = other DNA
catgagagatcgacacctgatgagt

SEQ ID NO: 8200 - DNA, 25 bp, synthetic construct
  source 1..25: mol_type = other DNA; mol_type = other DNA
ccatgtgggatcgacacctgatgag

SEQ ID NO: 8201 - DNA, 25 bp, synthetic construct
  source 1..25: mol_type = other DNA; mol_type = other DNA
ccatgggtgatcgacacctgatgag

SEQ ID NO: 8202 - DNA, 25 bp, synthetic construct
  source 1..25: mol_type = other DNA; mol_type = other DNA
ccatagaggatcgacacctgatgag

SEQ ID NO: 8203 - DNA, 25 bp, synthetic construct
  source 1..25: mol_type = other DNA; mol_type = other DNA
ccataggagatcgacacctgatgag

SEQ ID NO: 8204 - DNA, 25 bp, synthetic construct
  source 1..25: mol_type = other DNA; mol_type = other DNA
ccatgaaggatcgacacctgatgag

SEQ ID NO: 8205 - DNA, 25 bp, synthetic construct
  source 1..25: mol_type = other DNA; mol_type = other DNA
ccatgagagatcgacacctgatgag

SEQ ID NO: 8206 - DNA, 25 bp, synthetic construct
  source 1..25: mol_type = other DNA; mol_type = other DNA
accatgtgggatcgacacctgatga

SEQ ID NO: 8207 - DNA, 25 bp, synthetic construct
  source 1..25: mol_type = other DNA; mol_type = other DNA
accatggtggatcgacacctgatga

SEQ ID NO: 8208 - DNA, 25 bp, synthetic construct
  source 1..25: mol_type = other DNA; mol_type = other DNA
accatgggtgatcgacacctgatga

SEQ ID NO: 8209 - DNA, 25 bp, synthetic construct
  source 1..25: mol_type = other DNA; mol_type = other DNA
accatagaggatcgacacctgatga

SEQ ID NO: 8210 - DNA, 25 bp, synthetic construct
  source 1..25: mol_type = other DNA; mol_type = other DNA
accataggagatcgacacctgatga

SEQ ID NO: 8211 - DNA, 25 bp, synthetic construct
  source 1..25: mol_type = other DNA; mol_type = other DNA
accatgaaggatcgacacctgatga

SEQ ID NO: 8212 - DNA, 25 bp, synthetic construct
  source 1..25: mol_type = other DNA; mol_type = other DNA
accatgagagatcgacacctgatga

SEQ ID NO: 8213 - DNA, 25 bp, synthetic construct
  source 1..25: mol_type = other DNA; mol_type = other DNA
gaccatgtgggatcgacacctgatg

SEQ ID NO: 8214 - DNA, 25 bp, synthetic construct
  source 1..25: mol_type = other DNA; mol_type = other DNA
gaccatggtggatcgacacctgatg

SEQ ID NO: 8215 - DNA, 25 bp, synthetic construct
  source 1..25: mol_type = other DNA; mol_type = other DNA
gaccatgggtgatcgacacctgatg

SEQ ID NO: 8216 - DNA, 25 bp, synthetic construct
  source 1..25: mol_type = other DNA; mol_type = other DNA
aaccatggaggatcgacacctgatg

SEQ ID NO: 8217 - DNA, 25 bp, synthetic construct
  source 1..25: mol_type = other DNA; mol_type = other DNA
gaccatagaggatcgacacctgatg

SEQ ID NO: 8218 - DNA, 25 bp, synthetic construct
  source 1..25: mol_type = other DNA; mol_type = other DNA
gaccataggagatcgacacctgatg

SEQ ID NO: 8219 - DNA, 25 bp, synthetic construct
  source 1..25: mol_type = other DNA; mol_type = other DNA
cgaccatgtgggatcgacacctgat

SEQ ID NO: 8220 - DNA, 25 bp, synthetic construct
  source 1..25: mol_type = other DNA; mol_type = other DNA
cgaccatggtggatcgacacctgat

SEQ ID NO: 8221 - DNA, 25 bp, synthetic construct
  source 1..25: mol_type = other DNA; mol_type = other DNA
cgaccatgggtgatcgacacctgat

SEQ ID NO: 8222 - DNA, 25 bp, synthetic construct
  source 1..25: mol_type = other DNA; mol_type = other DNA
caaccatggaggatcgacacctgat

SEQ ID NO: 8223 - DNA, 25 bp, synthetic construct
  source 1..25: mol_type = other DNA; mol_type = other DNA
cgaccatagaggatcgacacctgat

SEQ ID NO: 8224 - DNA, 25 bp, synthetic construct
  source 1..25: mol_type = other DNA; mol_type = other DNA
cgaccataggagatcgacacctgat

SEQ ID NO: 8225 - DNA, 25 bp, synthetic construct
  source 1..25: mol_type = other DNA; mol_type = other DNA
ccgaccatgtgggatcgacacctga

SEQ ID NO: 8226 - DNA, 25 bp, synthetic construct
  source 1..25: mol_type = other DNA; mol_type = other DNA
ccgaccatggtggatcgacacctga

SEQ ID NO: 8227 - DNA, 25 bp, synthetic construct
  source 1..25: mol_type = other DNA; mol_type = other DNA
ccgaccatgggtgatcgacacctga

SEQ ID NO: 8228 - DNA, 25 bp, synthetic construct
  source 1..25: mol_type = other DNA; mol_type = other DNA
ccaaccatggaggatcgacacctga

SEQ ID NO: 8229 - DNA, 25 bp, synthetic construct
  source 1..25: mol_type = other DNA; mol_type = other DNA
ccgaccatagaggatcgacacctga

SEQ ID NO: 8230 - DNA, 25 bp, synthetic construct
  source 1..25: mol_type = other DNA; mol_type = other DNA
ccgaccataggagatcgacacctga

SEQ ID NO: 8231 - DNA, 25 bp, synthetic construct
  source 1..25: mol_type = other DNA; mol_type = other DNA
cccgaccatgtgggatcgacacctg

SEQ ID NO: 8232 - DNA, 25 bp, synthetic construct
  source 1..25: mol_type = other DNA; mol_type = other DNA
cccgaccatgggtgatcgacacctg

SEQ ID NO: 8233 - DNA, 25 bp, synthetic construct
  source 1..25: mol_type = other DNA; mol_type = other DNA
cccaaccatggaggatcgacacctg

SEQ ID NO: 8234 - DNA, 25 bp, synthetic construct
  source 1..25: mol_type = other DNA; mol_type = other DNA
cccgaccatagaggatcgacacctg

SEQ ID NO: 8235 - DNA, 25 bp, synthetic construct
  source 1..25: mol_type = other DNA; mol_type = other DNA
cccgaccataggagatcgacacctg

SEQ ID NO: 8236 - DNA, 25 bp, synthetic construct
  source 1..25: mol_type = other DNA; mol_type = other DNA
gcccgaccatgtgggatcgacacct

SEQ ID NO: 8237 - DNA, 25 bp, synthetic construct
  source 1..25: mol_type = other DNA; mol_type = other DNA
gcccgaccatggtggatcgacacct

SEQ ID NO: 8238 - DNA, 25 bp, synthetic construct
  source 1..25: mol_type = other DNA; mol_type = other DNA
gcccgaccatgggtgatcgacacct

SEQ ID NO: 8239 - DNA, 25 bp, synthetic construct
  source 1..25: mol_type = other DNA; mol_type = other DNA
acccgaccatggaggatcgacacct

SEQ ID NO: 8240 - DNA, 25 bp, synthetic construct
  source 1..25: mol_type = other DNA; mol_type = other DNA
gcccaaccatggaggatcgacacct

SEQ ID NO: 8241 - DNA, 25 bp, synthetic construct
  source 1..25: mol_type = other DNA; mol_type = other DNA
gcccgaccatagaggatcgacacct

SEQ ID NO: 8242 - DNA, 25 bp, synthetic construct
  source 1..25: mol_type = other DNA; mol_type = other DNA
gcccgaccataggagatcgacacct

SEQ ID NO: 8243 - DNA, 25 bp, synthetic construct
  source 1..25: mol_type = other DNA; mol_type = other DNA
agcccgaccatgtgggatcgacacc

SEQ ID NO: 8244 - DNA, 25 bp, synthetic construct
  source 1..25: mol_type = other DNA; mol_type = other DNA
agcccgaccatggtggatcgacacc

SEQ ID NO: 8245 - DNA, 25 bp, synthetic construct
  source 1..25: mol_type = other DNA; mol_type = other DNA
agcccgaccatgggtgatcgacacc

SEQ ID NO: 8246 - DNA, 25 bp, synthetic construct
  source 1..25: mol_type = other DNA; mol_type = other DNA
aacccgaccatggaggatcgacacc

SEQ ID NO: 8247 - DNA, 25 bp, synthetic construct
  source 1..25: mol_type = other DNA; mol_type = other DNA
agcccaaccatggaggatcgacacc

SEQ ID NO: 8248 - DNA, 25 bp, synthetic construct
  source 1..25: mol_type = other DNA; mol_type = other DNA
agcccgaccatagaggatcgacacc

SEQ ID NO: 8249 - DNA, 25 bp, synthetic construct
  source 1..25: mol_type = other DNA; mol_type = other DNA
agcccgaccataggagatcgacacc

SEQ ID NO: 8250 - DNA, 25 bp, synthetic construct
  source 1..25: mol_type = other DNA; mol_type = other DNA
gagcccgaccatgtgggatcgacac

SEQ ID NO: 8251 - DNA, 25 bp, synthetic construct
  source 1..25: mol_type = other DNA; mol_type = other DNA
gagcccgaccatggtggatcgacac

SEQ ID NO: 8252 - DNA, 25 bp, synthetic construct
  source 1..25: mol_type = other DNA; mol_type = other DNA
gagcccgaccatgggtgatcgacac

SEQ ID NO: 8253 - DNA, 25 bp, synthetic construct
  source 1..25: mol_type = other DNA; mol_type = other DNA
aagcccgaccatggaggatcgacac

SEQ ID NO: 8254 - DNA, 25 bp, synthetic construct
  source 1..25: mol_type = other DNA; mol_type = other DNA
gaacccgaccatggaggatcgacac

SEQ ID NO: 8255 - DNA, 25 bp, synthetic construct
  source 1..25: mol_type = other DNA; mol_type = other DNA
gagcccaaccatggaggatcgacac

SEQ ID NO: 8256 - DNA, 25 bp, synthetic construct
  source 1..25: mol_type = other DNA; mol_type = other DNA
gagcccgaccatagaggatcgacac

SEQ ID NO: 8257 - DNA, 25 bp, synthetic construct
  source 1..25: mol_type = other DNA; mol_type = other DNA
tgagcccgaccatgtgggatcgaca

SEQ ID NO: 8258 - DNA, 25 bp, synthetic construct
  source 1..25: mol_type = other DNA; mol_type = other DNA
tgagcccgaccatggtggatcgaca

SEQ ID NO: 8259 - DNA, 25 bp, synthetic construct
  source 1..25: mol_type = other DNA; mol_type = other DNA
tgagcccgaccatgggtgatcgaca

SEQ ID NO: 8260 - DNA, 25 bp, synthetic construct
  source 1..25: mol_type = other DNA; mol_type = other DNA
taagcccgaccatggaggatcgaca

SEQ ID NO: 8261 - DNA, 25 bp, synthetic construct
  source 1..25: mol_type = other DNA; mol_type = other DNA
tgaacccgaccatggaggatcgaca

SEQ ID NO: 8262 - DNA, 25 bp, synthetic construct
  source 1..25: mol_type = other DNA; mol_type = other DNA
tgagcccaaccatggaggatcgaca

SEQ ID NO: 8263 - DNA, 25 bp, synthetic construct
  source 1..25: mol_type = other DNA; mol_type = other DNA
tgagcccgaccatagaggatcgaca

SEQ ID NO: 8264 - DNA, 25 bp, synthetic construct
  source 1..25: mol_type = other DNA; mol_type = other DNA
ctgagcccgaccatgtgggatcgac

SEQ ID NO: 8265 - DNA, 25 bp, synthetic construct
  source 1..25: mol_type = other DNA; mol_type = other DNA
ctgagcccgaccatgggtgatcgac

SEQ ID NO: 8266 - DNA, 25 bp, synthetic construct
  source 1..25: mol_type = other DNA; mol_type = other DNA
ctaagcccgaccatggaggatcgac

SEQ ID NO: 8267 - DNA, 25 bp, synthetic construct
  source 1..25: mol_type = other DNA; mol_type = other DNA
ctgaacccgaccatggaggatcgac

SEQ ID NO: 8268 - DNA, 25 bp, synthetic construct
  source 1..25: mol_type = other DNA; mol_type = other DNA
ctgagcccaaccatggaggatcgac

SEQ ID NO: 8269 - DNA, 25 bp, synthetic construct
  source 1..25: mol_type = other DNA; mol_type = other DNA
ctgagcccgaccatagaggatcgac

SEQ ID NO: 8270 - DNA, 25 bp, synthetic construct
  source 1..25: mol_type = other DNA; mol_type = other DNA
cctgagcccgaccatgtgggatcga

SEQ ID NO: 8271 - DNA, 25 bp, synthetic construct
  source 1..25: mol_type = other DNA; mol_type = other DNA
cctgagcccgaccatggtggatcga

SEQ ID NO: 8272 - DNA, 25 bp, synthetic construct
  source 1..25: mol_type = other DNA; mol_type = other DNA
cctgagcccgaccatgggtgatcga

SEQ ID NO: 8273 - DNA, 25 bp, synthetic construct
  source 1..25: mol_type = other DNA; mol_type = other DNA
cctaagcccgaccatggaggatcga

SEQ ID NO: 8274 - DNA, 25 bp, synthetic construct
  source 1..25: mol_type = other DNA; mol_type = other DNA
cctgaacccgaccatggaggatcga

SEQ ID NO: 8275 - DNA, 25 bp, synthetic construct
  source 1..25: mol_type = other DNA; mol_type = other DNA
cctgagcccaaccatggaggatcga

SEQ ID NO: 8276 - DNA, 25 bp, synthetic construct
  source 1..25: mol_type = other DNA; mol_type = other DNA
cctgagcccgaccatagaggatcga

SEQ ID NO: 8277 - DNA, 25 bp, synthetic construct
  source 1..25: mol_type = other DNA; mol_type = other DNA
acctgagcccgaccatgtgggatcg

SEQ ID NO: 8278 - DNA, 25 bp, synthetic construct
  source 1..25: mol_type = other DNA; mol_type = other DNA
acctgagcccgaccatggtggatcg

SEQ ID NO: 8279 - DNA, 25 bp, synthetic construct
  source 1..25: mol_type = other DNA; mol_type = other DNA
acctgagcccgaccatgggtgatcg

SEQ ID NO: 8280 - DNA, 25 bp, synthetic construct
  source 1..25: mol_type = other DNA; mol_type = other DNA
acctaagcccgaccatggaggatcg

SEQ ID NO: 8281 - DNA, 25 bp, synthetic construct
  source 1..25: mol_type = other DNA; mol_type = other DNA
acctgaacccgaccatggaggatcg

SEQ ID NO: 8282 - DNA, 25 bp, synthetic construct
  source 1..25: mol_type = other DNA; mol_type = other DNA
acctgagcccaaccatggaggatcg

SEQ ID NO: 8283 - DNA, 25 bp, synthetic construct
  source 1..25: mol_type = other DNA; mol_type = other DNA
acctgagcccgaccatagaggatcg

SEQ ID NO: 8284 - DNA, 25 bp, synthetic construct
  source 1..25: mol_type = other DNA; mol_type = other DNA
cacctgagcccgaccatgggaaatc

SEQ ID NO: 8285 - DNA, 25 bp, synthetic construct
  source 1..25: mol_type = other DNA; mol_type = other DNA
cacctgagcccgaccatgtgggatc

SEQ ID NO: 8286 - DNA, 25 bp, synthetic construct
  source 1..25: mol_type = other DNA; mol_type = other DNA
cacctgagcccgaccatggtggatc

SEQ ID NO: 8287 - DNA, 25 bp, synthetic construct
  source 1..25: mol_type = other DNA; mol_type = other DNA
cacctgagcccgaccatgggtgatc

SEQ ID NO: 8288 - DNA, 25 bp, synthetic construct
  source 1..25: mol_type = other DNA; mol_type = other DNA
ccacctgagcccgaccatgtgggat

SEQ ID NO: 8289 - DNA, 25 bp, synthetic construct
  source 1..25: mol_type = other DNA; mol_type = other DNA
ccacctgagcccgaccatggtggat

SEQ ID NO: 8290 - DNA, 25 bp, synthetic construct
  source 1..25: mol_type = other DNA; mol_type = other DNA
ccacctgagcccgaccatgggtgat

SEQ ID NO: 8291 - DNA, 25 bp, synthetic construct
  source 1..25: mol_type = other DNA; mol_type = other DNA
ccacctgagcccgaccatgggaaat

SEQ ID NO: 8292 - DNA, 25 bp, synthetic construct
  source 1..25: mol_type = other DNA; mol_type = other DNA
cccacctgagcccgaccatgtggga

SEQ ID NO: 8293 - DNA, 25 bp, synthetic construct
  source 1..25: mol_type = other DNA; mol_type = other DNA
cccacctgagcccgaccatgggtga

SEQ ID NO: 8294 - DNA, 25 bp, synthetic construct
  source 1..25: mol_type = other DNA; mol_type = other DNA
cccacctgagcccgaccatgggaaa

SEQ ID NO: 8295 - DNA, 25 bp, synthetic construct
  source 1..25: mol_type = other DNA; mol_type = other DNA
gcccacctgagcccgaccatgtggg

SEQ ID NO: 8296 - DNA, 25 bp, synthetic construct
  source 1..25: mol_type = other DNA; mol_type = other DNA
gcccacctgagcccgaccatggtgg

SEQ ID NO: 8297 - DNA, 25 bp, synthetic construct
  source 1..25: mol_type = other DNA; mol_type = other DNA
gcccacctgagcccgaccatgggtg

SEQ ID NO: 8298 - DNA, 25 bp, synthetic construct
  source 1..25: mol_type = other DNA; mol_type = other DNA
gcccacctgagcccgaccatgggaa

SEQ ID NO: 8299 - DNA, 25 bp, synthetic construct
  source 1..25: mol_type = other DNA; mol_type = other DNA
ggcccacctgagcccgaccatggga

SEQ ID NO: 8300 - DNA, 25 bp, synthetic construct
  source 1..25: mol_type = other DNA; mol_type = other DNA
ggcccacctgagcccgaccatggaa

SEQ ID NO: 8301 - DNA, 25 bp, synthetic construct
  source 1..25: mol_type = other DNA; mol_type = other DNA
gggcccacctgagcccgaccatggg

SEQ ID NO: 8302 - DNA, 25 bp, synthetic construct
  source 1..25: mol_type = other DNA; mol_type = other DNA
gggcccacctgagcccgaccatgga

SEQ ID NO: 8303 - DNA, 25 bp, synthetic construct
  source 1..25: mol_type = other DNA; mol_type = other DNA
gggcccacctgagcccgaccatgaa

SEQ ID NO: 8304 - DNA, 25 bp, synthetic construct
  source 1..25: mol_type = other DNA; mol_type = other DNA
tgggcccacctgagcccgaccatgg

SEQ ID NO: 8305 - DNA, 25 bp, synthetic construct
  source 1..25: mol_type = other DNA; mol_type = other DNA
tgggcccacctgagcccgaccatga

SEQ ID NO: 8306 - DNA, 25 bp, synthetic construct
  source 1..25: mol_type = other DNA; mol_type = other DNA
tgggcccacctgagcccgaccataa

SEQ ID NO: 8307 - DNA, 25 bp, synthetic construct
  source 1..25: mol_type = other DNA; mol_type = other DNA
ctgggcccacctgagcccgaccata

SEQ ID NO: 8308 - DNA, 25 bp, synthetic construct
  source 1..25: mol_type = other DNA; mol_type = other DNA
ctgggcccacctgagcccaaccata

SEQ ID NO: 8309 - DNA, 25 bp, synthetic construct
  source 1..25: mol_type = other DNA; mol_type = other DNA
cctgggcccacctgagcccgaccat

SEQ ID NO: 8310 - DNA, 25 bp, synthetic construct
  source 1..25: mol_type = other DNA; mol_type = other DNA
cctgggcccacctgagcccaaccat

SEQ ID NO: 8311 - DNA, 25 bp, synthetic construct
  source 1..25: mol_type = other DNA; mol_type = other DNA
cctgggcccacctgaacccaaccat

SEQ ID NO: 8312 - DNA, 25 bp, synthetic construct
  source 1..25: mol_type = other DNA; mol_type = other DNA
acctgggcccacctgagcccgacca

SEQ ID NO: 8313 - DNA, 25 bp, synthetic construct
  source 1..25: mol_type = other DNA; mol_type = other DNA
acctgggcccacctgagcccaacca

SEQ ID NO: 8314 - DNA, 25 bp, synthetic construct
  source 1..25: mol_type = other DNA; mol_type = other DNA
acctgggcccacctgaacccaacca

SEQ ID NO: 8315 - DNA, 25 bp, synthetic construct
  source 1..25: mol_type = other DNA; mol_type = other DNA
gacctgggcccacctgagcccaacc

SEQ ID NO: 8316 - DNA, 25 bp, synthetic construct
  source 1..25: mol_type = other DNA; mol_type = other DNA
gacctgggcccacctgaacccaacc

SEQ ID NO: 8317 - DNA, 25 bp, synthetic construct
  source 1..25: mol_type = other DNA; mol_type = other DNA
agacctgggcccacctgagcccgac

SEQ ID NO: 8318 - DNA, 25 bp, synthetic construct
  source 1..25: mol_type = other DNA; mol_type = other DNA
agacctgggcccacctgagcccaac

SEQ ID NO: 8319 - DNA, 25 bp, synthetic construct
  source 1..25: mol_type = other DNA; mol_type = other DNA
agacctgggcccacctgaacccaac

SEQ ID NO: 8320 - DNA, 25 bp, synthetic construct
  source 1..25: mol_type = other DNA; mol_type = other DNA
gagacctgggcccacctgagcccaa

SEQ ID NO: 8321 - DNA, 25 bp, synthetic construct
  source 1..25: mol_type = other DNA; mol_type = other DNA
gagacctgggcccacctgaacccaa

SEQ ID NO: 8322 - DNA, 25 bp, synthetic construct
  source 1..25: mol_type = other DNA; mol_type = other DNA
cgagacctgggcccacctgagccca

SEQ ID NO: 8323 - DNA, 25 bp, synthetic construct
  source 1..25: mol_type = other DNA; mol_type = other DNA
cgagacctgggcccacctgaaccca

SEQ ID NO: 8324 - DNA, 25 bp, synthetic construct
  source 1..25: mol_type = other DNA; mol_type = other DNA
acgagacctgggcccacctgagccc

SEQ ID NO: 8325 - DNA, 25 bp, synthetic construct
  source 1..25: mol_type = other DNA; mol_type = other DNA
acgagacctgggcccacctgaaccc

SEQ ID NO: 8326 - DNA, 25 bp, synthetic construct
  source 1..25: mol_type = other DNA; mol_type = other DNA
acgagacctgggcccacctaaaccc

SEQ ID NO: 8327 - DNA, 25 bp, synthetic construct
  source 1..25: mol_type = other DNA; mol_type = other DNA
gacgagacctgggcccacctgagcc

SEQ ID NO: 8328 - DNA, 25 bp, synthetic construct
  source 1..25: mol_type = other DNA; mol_type = other DNA
gacgagacctgggcccacctgaacc

SEQ ID NO: 8329 - DNA, 25 bp, synthetic construct
  source 1..25: mol_type = other DNA; mol_type = other DNA
gacgagacctgggcccacctaaacc

SEQ ID NO: 8330 - DNA, 25 bp, synthetic construct
  source 1..25: mol_type = other DNA; mol_type = other DNA
tgacgagacctgggcccacctgaac

SEQ ID NO: 8331 - DNA, 25 bp, synthetic construct
  source 1..25: mol_type = other DNA; mol_type = other DNA
tgacgagacctgggcccacctaaac

SEQ ID NO: 8332 - DNA, 25 bp, synthetic construct
  source 1..25: mol_type = other DNA; mol_type = other DNA
atgacgagacctgggcccacctgag

SEQ ID NO: 8333 - DNA, 25 bp, synthetic construct
  source 1..25: mol_type = other DNA; mol_type = other DNA
atgacgagacctgggcccacctgaa

SEQ ID NO: 8334 - DNA, 25 bp, synthetic construct
  source 1..25: mol_type = other DNA; mol_type = other DNA
atgacgagacctgggcccacctaaa

SEQ ID NO: 8335 - DNA, 25 bp, synthetic construct
  source 1..25: mol_type = other DNA; mol_type = other DNA
aatgacgagacctgggcccacctga

SEQ ID NO: 8336 - DNA, 25 bp, synthetic construct
  source 1..25: mol_type = other DNA; mol_type = other DNA
aatgacgagacctgggcccacctaa

SEQ ID NO: 8337 - DNA, 25 bp, synthetic construct
  source 1..25: mol_type = other DNA; mol_type = other DNA
aatgacgagacctggacccacctaa

SEQ ID NO: 8338 - DNA, 25 bp, synthetic construct
  source 1..25: mol_type = other DNA; mol_type = other DNA
caatgacgagacctgggcccaccta

SEQ ID NO: 8339 - DNA, 25 bp, synthetic construct
  source 1..25: mol_type = other DNA; mol_type = other DNA
caatgacgagacctggacccaccta

SEQ ID NO: 8340 - DNA, 25 bp, synthetic construct
  source 1..25: mol_type = other DNA; mol_type = other DNA
ccaatgacgagacctgggcccacct

SEQ ID NO: 8341 - DNA, 25 bp, synthetic construct
  source 1..25: mol_type = other DNA; mol_type = other DNA
ccaatgacgagacctggacccacct

SEQ ID NO: 8342 - DNA, 25 bp, synthetic construct
  source 1..25: mol_type = other DNA; mol_type = other DNA
ccaatgacgagacctgaacccacct

SEQ ID NO: 8343 - DNA, 25 bp, synthetic construct
  source 1..25: mol_type = other DNA; mol_type = other DNA
gccaatgacgagacctgggcccacc

SEQ ID NO: 8344 - DNA, 25 bp, synthetic construct
  source 1..25: mol_type = other DNA; mol_type = other DNA
gccaatgacgagacctggacccacc

SEQ ID NO: 8345 - DNA, 25 bp, synthetic construct
  source 1..25: mol_type = other DNA; mol_type = other DNA
gccaatgacgagacctgaacccacc

SEQ ID NO: 8346 - DNA, 25 bp, synthetic construct
  source 1..25: mol_type = other DNA; mol_type = other DNA
agccaatgacgagacctggacccac

SEQ ID NO: 8347 - DNA, 25 bp, synthetic construct
  source 1..25: mol_type = other DNA; mol_type = other DNA
agccaatgacgagacctgaacccac

SEQ ID NO: 8348 - DNA, 25 bp, synthetic construct
  source 1..25: mol_type = other DNA; mol_type = other DNA
gagccaatgacgagacctgggccca

SEQ ID NO: 8349 - DNA, 25 bp, synthetic construct
  source 1..25: mol_type = other DNA; mol_type = other DNA
gagccaatgacgagacctggaccca

SEQ ID NO: 8350 - DNA, 25 bp, synthetic construct
  source 1..25: mol_type = other DNA; mol_type = other DNA
gagccaatgacgagacctgaaccca

SEQ ID NO: 8351 - DNA, 25 bp, synthetic construct
  source 1..25: mol_type = other DNA; mol_type = other DNA
agagccaatgacgagacctgggccc

SEQ ID NO: 8352 - DNA, 25 bp, synthetic construct
  source 1..25: mol_type = other DNA; mol_type = other DNA
agagccaatgacgagacctggaccc

SEQ ID NO: 8353 - DNA, 25 bp, synthetic construct
  source 1..25: mol_type = other DNA; mol_type = other DNA
agagccaatgacgagacctgaaccc

SEQ ID NO: 8354 - DNA, 25 bp, synthetic construct
  source 1..25: mol_type = other DNA; mol_type = other DNA
cagagccaatgacgagacctggacc

SEQ ID NO: 8355 - DNA, 25 bp, synthetic construct
  source 1..25: mol_type = other DNA; mol_type = other DNA
cagagccaatgacgagacctgaacc

SEQ ID NO: 8356 - DNA, 25 bp, synthetic construct
  source 1..25: mol_type = other DNA; mol_type = other DNA
acagagccaatgacgagacctgggc

SEQ ID NO: 8357 - DNA, 25 bp, synthetic construct
  source 1..25: mol_type = other DNA; mol_type = other DNA
acagagccaatgacgagacctggac

SEQ ID NO: 8358 - DNA, 25 bp, synthetic construct
  source 1..25: mol_type = other DNA; mol_type = other DNA
acagagccaatgacgagacctgaac

SEQ ID NO: 8359 - DNA, 25 bp, synthetic construct
  source 1..25: mol_type = other DNA; mol_type = other DNA
gacagagccaatgacgagacctggg

SEQ ID NO: 8360 - DNA, 25 bp, synthetic construct
  source 1..25: mol_type = other DNA; mol_type = other DNA
gacagagccaatgacgagacctgga

SEQ ID NO: 8361 - DNA, 25 bp, synthetic construct
  source 1..25: mol_type = other DNA; mol_type = other DNA
gacagagccaatgacgagacctgaa

SEQ ID NO: 8362 - DNA, 25 bp, synthetic construct
  source 1..25: mol_type = other DNA; mol_type = other DNA
ggacagagccaatgacgagacctga

SEQ ID NO: 8363 - DNA, 25 bp, synthetic construct
  source 1..25: mol_type = other DNA; mol_type = other DNA
ggacagagccaatgacgagacctaa

SEQ ID NO: 8364 - DNA, 25 bp, synthetic construct
  source 1..25: mol_type = other DNA; mol_type = other DNA
aggacagagccaatgacgagacctg

SEQ ID NO: 8365 - DNA, 25 bp, synthetic construct
  source 1..25: mol_type = other DNA; mol_type = other DNA
aggacagagccaatgacgagaccta

SEQ ID NO: 8366 - DNA, 25 bp, synthetic construct
  source 1..25: mol_type = other DNA; mol_type = other DNA
aggacagagccaatgacgaaaccta

SEQ ID NO: 8367 - DNA, 25 bp, synthetic construct
  source 1..25: mol_type = other DNA; mol_type = other DNA
gaggacagagccaatgacgagacct

SEQ ID NO: 8368 - DNA, 25 bp, synthetic construct
  source 1..25: mol_type = other DNA; mol_type = other DNA
gaggacagagccaatgacgaaacct

SEQ ID NO: 8369 - DNA, 25 bp, synthetic construct
  source 1..25: mol_type = other DNA; mol_type = other DNA
gaggacagagccaatgacaaaacct

SEQ ID NO: 8370 - DNA, 25 bp, synthetic construct
  source 1..25: mol_type = other DNA; mol_type = other DNA
agaggacagagccaatgacgaaacc

SEQ ID NO: 8371 - DNA, 25 bp, synthetic construct
  source 1..25: mol_type = other DNA; mol_type = other DNA
agaggacagagccaatgacaaaacc

SEQ ID NO: 8372 - DNA, 25 bp, synthetic construct
  source 1..25: mol_type = other DNA; mol_type = other DNA
gagaggacagagccaatgacgagac

SEQ ID NO: 8373 - DNA, 25 bp, synthetic construct
  source 1..25: mol_type = other DNA; mol_type = other DNA
gagaggacagagccaatgacgaaac

SEQ ID NO: 8374 - DNA, 25 bp, synthetic construct
  source 1..25: mol_type = other DNA; mol_type = other DNA
gagaggacagagccaatgacaaaac

SEQ ID NO: 8375 - DNA, 25 bp, synthetic construct
  source 1..25: mol_type = other DNA; mol_type = other DNA
ggagaggacagagccaatgacgaga

SEQ ID NO: 8376 - DNA, 25 bp, synthetic construct
  source 1..25: mol_type = other DNA; mol_type = other DNA
ggagaggacagagccaatgacgaaa

SEQ ID NO: 8377 - DNA, 25 bp, synthetic construct
  source 1..25: mol_type = other DNA; mol_type = other DNA
ggagaggacagagccaatgacaaaa

SEQ ID NO: 8378 - DNA, 25 bp, synthetic construct
  source 1..25: mol_type = other DNA; mol_type = other DNA
aggagaggacagagccaatgacgaa

SEQ ID NO: 8379 - DNA, 25 bp, synthetic construct
  source 1..25: mol_type = other DNA; mol_type = other DNA
aggagaggacagagccaatgacaaa

SEQ ID NO: 8380 - DNA, 25 bp, synthetic construct
  source 1..25: mol_type = other DNA; mol_type = other DNA
caggagaggacagagccaatgacga

SEQ ID NO: 8381 - DNA, 25 bp, synthetic construct
  source 1..25: mol_type = other DNA; mol_type = other DNA
caggagaggacagagccaatgacaa

SEQ ID NO: 8382 - DNA, 25 bp, synthetic construct
  source 1..25: mol_type = other DNA; mol_type = other DNA
caggagaggacagagccaataacaa

SEQ ID NO: 8383 - DNA, 25 bp, synthetic construct
  source 1..25: mol_type = other DNA; mol_type = other DNA
acaggagaggacagagccaatgacg

SEQ ID NO: 8384 - DNA, 25 bp, synthetic construct
  source 1..25: mol_type = other DNA; mol_type = other DNA
acaggagaggacagagccaatgaca

SEQ ID NO: 8385 - DNA, 25 bp, synthetic construct
  source 1..25: mol_type = other DNA; mol_type = other DNA
acaggagaggacagagccaataaca

SEQ ID NO: 8386 - DNA, 25 bp, synthetic construct
  source 1..25: mol_type = other DNA; mol_type = other DNA
cacaggagaggacagagccaataac

SEQ ID NO: 8387 - DNA, 25 bp, synthetic construct
  source 1..25: mol_type = other DNA; mol_type = other DNA
cacaggagaggacagaaccaataac

SEQ ID NO: 8388 - DNA, 25 bp, synthetic construct
  source 1..25: mol_type = other DNA; mol_type = other DNA
tcacaggagaggacagagccaatga

SEQ ID NO: 8389 - DNA, 25 bp, synthetic construct
  source 1..25: mol_type = other DNA; mol_type = other DNA
tcacaggagaggacagagccaataa

SEQ ID NO: 8390 - DNA, 25 bp, synthetic construct
  source 1..25: mol_type = other DNA; mol_type = other DNA
tcacaggagaggacagaaccaataa

SEQ ID NO: 8391 - DNA, 25 bp, synthetic construct
  source 1..25: mol_type = other DNA; mol_type = other DNA
ctcacaggagaggacagagccaatg

SEQ ID NO: 8392 - DNA, 25 bp, synthetic construct
  source 1..25: mol_type = other DNA; mol_type = other DNA
ctcacaggagaggacagagccaata

SEQ ID NO: 8393 - DNA, 25 bp, synthetic construct
  source 1..25: mol_type = other DNA; mol_type = other DNA
ctcacaggagaggacagaaccaata

SEQ ID NO: 8394 - DNA, 25 bp, synthetic construct
  source 1..25: mol_type = other DNA; mol_type = other DNA
cctcacaggagaggacagaaccaat

SEQ ID NO: 8395 - DNA, 25 bp, synthetic construct
  source 1..25: mol_type = other DNA; mol_type = other DNA
cctcacaggagaggacaaaaccaat

SEQ ID NO: 8396 - DNA, 25 bp, synthetic construct
  source 1..25: mol_type = other DNA; mol_type = other DNA
gcctcacaggagaggacagagccaa

SEQ ID NO: 8397 - DNA, 25 bp, synthetic construct
  source 1..25: mol_type = other DNA; mol_type = other DNA
gcctcacaggagaggacagaaccaa

SEQ ID NO: 8398 - DNA, 25 bp, synthetic construct
  source 1..25: mol_type = other DNA; mol_type = other DNA
gcctcacaggagaggacaaaaccaa

SEQ ID NO: 8399 - DNA, 25 bp, synthetic construct
  source 1..25: mol_type = other DNA; mol_type = other DNA
tgcctcacaggagaggacagagcca

SEQ ID NO: 8400 - DNA, 25 bp, synthetic construct
  source 1..25: mol_type = other DNA; mol_type = other DNA
tgcctcacaggagaggacagaacca

SEQ ID NO: 8401 - DNA, 25 bp, synthetic construct
  source 1..25: mol_type = other DNA; mol_type = other DNA
tgcctcacaggagaggacaaaacca

SEQ ID NO: 8402 - DNA, 25 bp, synthetic construct
  source 1..25: mol_type = other DNA; mol_type = other DNA
ctgcctcacaggagaggacagaacc

SEQ ID NO: 8403 - DNA, 25 bp, synthetic construct
  source 1..25: mol_type = other DNA; mol_type = other DNA
ctgcctcacaggagaggacaaaacc

SEQ ID NO: 8404 - DNA, 25 bp, synthetic construct
  source 1..25: mol_type = other DNA; mol_type = other DNA
gctgcctcacaggagaggacagagc

SEQ ID NO: 8405 - DNA, 25 bp, synthetic construct
  source 1..25: mol_type = other DNA; mol_type = other DNA
gctgcctcacaggagaggacagaac

SEQ ID NO: 8406 - DNA, 25 bp, synthetic construct
  source 1..25: mol_type = other DNA; mol_type = other DNA
gctgcctcacaggagaggacaaaac

SEQ ID NO: 8407 - DNA, 25 bp, synthetic construct
  source 1..25: mol_type = other DNA; mol_type = other DNA
agctgcctcacaggagaggacagag

SEQ ID NO: 8408 - DNA, 25 bp, synthetic construct
  source 1..25: mol_type = other DNA; mol_type = other DNA
agctgcctcacaggagaggacagaa

SEQ ID NO: 8409 - DNA, 25 bp, synthetic construct
  source 1..25: mol_type = other DNA; mol_type = other DNA
agctgcctcacaggagaggacaaaa

SEQ ID NO: 8410 - DNA, 25 bp, synthetic construct
  source 1..25: mol_type = other DNA; mol_type = other DNA
cagctgcctcacaggagaggacaaa

SEQ ID NO: 8411 - DNA, 25 bp, synthetic construct
  source 1..25: mol_type = other DNA; mol_type = other DNA
cagctgcctcacaggagagaacaaa

SEQ ID NO: 8412 - DNA, 25 bp, synthetic construct
  source 1..25: mol_type = other DNA; mol_type = other DNA
gcagctgcctcacaggagaggacag

SEQ ID NO: 8413 - DNA, 25 bp, synthetic construct
  source 1..25: mol_type = other DNA; mol_type = other DNA
gcagctgcctcacaggagaggacaa

SEQ ID NO: 8414 - DNA, 25 bp, synthetic construct
  source 1..25: mol_type = other DNA; mol_type = other DNA
gcagctgcctcacaggagagaacaa

SEQ ID NO: 8415 - DNA, 25 bp, synthetic construct
  source 1..25: mol_type = other DNA; mol_type = other DNA
tgcagctgcctcacaggagaggaca

SEQ ID NO: 8416 - DNA, 25 bp, synthetic construct
  source 1..25: mol_type = other DNA; mol_type = other DNA
tgcagctgcctcacaggagagaaca

SEQ ID NO: 8417 - DNA, 25 bp, synthetic construct
  source 1..25: mol_type = other DNA; mol_type = other DNA
tgcagctgcctcacaggagaaaaca

SEQ ID NO: 8418 - DNA, 25 bp, synthetic construct
  source 1..25: mol_type = other DNA; mol_type = other DNA
ctgcagctgcctcacaggagagaac

SEQ ID NO: 8419 - DNA, 25 bp, synthetic construct
  source 1..25: mol_type = other DNA; mol_type = other DNA
ctgcagctgcctcacaggagaaaac

SEQ ID NO: 8420 - DNA, 25 bp, synthetic construct
  source 1..25: mol_type = other DNA; mol_type = other DNA
gctgcagctgcctcacaggagagga

SEQ ID NO: 8421 - DNA, 25 bp, synthetic construct
  source 1..25: mol_type = other DNA; mol_type = other DNA
gctgcagctgcctcacaggagagaa

SEQ ID NO: 8422 - DNA, 25 bp, synthetic construct
  source 1..25: mol_type = other DNA; mol_type = other DNA
gctgcagctgcctcacaggagaaaa

SEQ ID NO: 8423 - DNA, 25 bp, synthetic construct
  source 1..25: mol_type = other DNA; mol_type = other DNA
tgctgcagctgcctcacaggagagg

SEQ ID NO: 8424 - DNA, 25 bp, synthetic construct
  source 1..25: mol_type = other DNA; mol_type = other DNA
tgctgcagctgcctcacaggagaga

SEQ ID NO: 8425 - DNA, 25 bp, synthetic construct
  source 1..25: mol_type = other DNA; mol_type = other DNA
tgctgcagctgcctcacaggagaaa

SEQ ID NO: 8426 - DNA, 25 bp, synthetic construct
  source 1..25: mol_type = other DNA; mol_type = other DNA
ctgctgcagctgcctcacaggagaa

SEQ ID NO: 8427 - DNA, 25 bp, synthetic construct
  source 1..25: mol_type = other DNA; mol_type = other DNA
ctgctgcagctgcctcacaggaaaa

SEQ ID NO: 8428 - DNA, 25 bp, synthetic construct
  source 1..25: mol_type = other DNA; mol_type = other DNA
actgctgcagctgcctcacaggaga

SEQ ID NO: 8429 - DNA, 25 bp, synthetic construct
  source 1..25: mol_type = other DNA; mol_type = other DNA
actgctgcagctgcctcacaggaaa

SEQ ID NO: 8430 - DNA, 25 bp, synthetic construct
  source 1..25: mol_type = other DNA; mol_type = other DNA
actgctgcagctgcctcacagaaaa

SEQ ID NO: 8431 - DNA, 25 bp, synthetic construct
  source 1..25: mol_type = other DNA; mol_type = other DNA
aactgctgcagctgcctcacaggag

SEQ ID NO: 8432 - DNA, 25 bp, synthetic construct
  source 1..25: mol_type = other DNA; mol_type = other DNA
aactgctgcagctgcctcacaggaa

SEQ ID NO: 8433 - DNA, 25 bp, synthetic construct
  source 1..25: mol_type = other DNA; mol_type = other DNA
aactgctgcagctgcctcacagaaa

SEQ ID NO: 8434 - DNA, 25 bp, synthetic construct
  source 1..25: mol_type = other DNA; mol_type = other DNA
caactgctgcagctgcctcacagaa

SEQ ID NO: 8435 - DNA, 25 bp, synthetic construct
  source 1..25: mol_type = other DNA; mol_type = other DNA
caactgctgcagctgcctcacaaaa

SEQ ID NO: 8436 - DNA, 25 bp, synthetic construct
  source 1..25: mol_type = other DNA; mol_type = other DNA
gcaactgctgcagctgcctcacagg

SEQ ID NO: 8437 - DNA, 25 bp, synthetic construct
  source 1..25: mol_type = other DNA; mol_type = other DNA
gcaactgctgcagctgcctcacaga

SEQ ID NO: 8438 - DNA, 25 bp, synthetic construct
  source 1..25: mol_type = other DNA; mol_type = other DNA
gcaactgctgcagctgcctcacaaa

SEQ ID NO: 8439 - DNA, 25 bp, synthetic construct
  source 1..25: mol_type = other DNA; mol_type = other DNA
tgcaactgctgcagctgcctcacag

SEQ ID NO: 8440 - DNA, 25 bp, synthetic construct
  source 1..25: mol_type = other DNA; mol_type = other DNA
tgcaactgctgcagctgcctcacaa

SEQ ID NO: 8441 - DNA, 25 bp, synthetic construct
  source 1..25: mol_type = other DNA; mol_type = other DNA
tgcaactgctgcagctacctcacaa

SEQ ID NO: 8442 - DNA, 25 bp, synthetic construct
  source 1..25: mol_type = other DNA; mol_type = other DNA
ctgcaactgctgcagctacctcaca

SEQ ID NO: 8443 - DNA, 25 bp, synthetic construct
  source 1..25: mol_type = other DNA; mol_type = other DNA
ctgcaactgctgcaactacctcaca

SEQ ID NO: 8444 - DNA, 25 bp, synthetic construct
  source 1..25: mol_type = other DNA; mol_type = other DNA
cctgcaactgctgcagctgcctcac

SEQ ID NO: 8445 - DNA, 25 bp, synthetic construct
  source 1..25: mol_type = other DNA; mol_type = other DNA
cctgcaactgctgcagctacctcac

SEQ ID NO: 8446 - DNA, 25 bp, synthetic construct
  source 1..25: mol_type = other DNA; mol_type = other DNA
cctgcaactgctgcaactacctcac

SEQ ID NO: 8447 - DNA, 25 bp, synthetic construct
  source 1..25: mol_type = other DNA; mol_type = other DNA
ccctgcaactgctgcagctgcctca

SEQ ID NO: 8448 - DNA, 25 bp, synthetic construct
  source 1..25: mol_type = other DNA; mol_type = other DNA
ccctgcaactgctgcagctacctca

SEQ ID NO: 8449 - DNA, 25 bp, synthetic construct
  source 1..25: mol_type = other DNA; mol_type = other DNA
ccctgcaactgctgcaactacctca

SEQ ID NO: 8450 - DNA, 25 bp, synthetic construct
  source 1..25: mol_type = other DNA; mol_type = other DNA
gccctgcaactgctgcagctacctc

SEQ ID NO: 8451 - DNA, 25 bp, synthetic construct
  source 1..25: mol_type = other DNA; mol_type = other DNA
gccctgcaactgctgcaactacctc

SEQ ID NO: 8452 - DNA, 25 bp, synthetic construct
  source 1..25: mol_type = other DNA; mol_type = other DNA
tgccctgcaactgctgcagctgcct

SEQ ID NO: 8453 - DNA, 25 bp, synthetic construct
  source 1..25: mol_type = other DNA; mol_type = other DNA
tgccctgcaactgctgcagctacct

SEQ ID NO: 8454 - DNA, 25 bp, synthetic construct
  source 1..25: mol_type = other DNA; mol_type = other DNA
tgccctgcaactgctgcaactacct

SEQ ID NO: 8455 - DNA, 25 bp, synthetic construct
  source 1..25: mol_type = other DNA; mol_type = other DNA
ctgccctgcaactgctgcagctgcc

SEQ ID NO: 8456 - DNA, 25 bp, synthetic construct
  source 1..25: mol_type = other DNA; mol_type = other DNA
ctgccctgcaactgctgcagctacc

SEQ ID NO: 8457 - DNA, 25 bp, synthetic construct
  source 1..25: mol_type = other DNA; mol_type = other DNA
ctgccctgcaactgctgcaactacc

SEQ ID NO: 8458 - DNA, 25 bp, synthetic construct
  source 1..25: mol_type = other DNA; mol_type = other DNA
cctgccctgcaactgctgcagctac

SEQ ID NO: 8459 - DNA, 25 bp, synthetic construct
  source 1..25: mol_type = other DNA; mol_type = other DNA
cctgccctgcaactgctgcaactac

SEQ ID NO: 8460 - DNA, 25 bp, synthetic construct
  source 1..25: mol_type = other DNA; mol_type = other DNA
ccctgccctgcaactgctgcagctg

SEQ ID NO: 8461 - DNA, 25 bp, synthetic construct
  source 1..25: mol_type = other DNA; mol_type = other DNA
ccctgccctgcaactgctgcagcta

SEQ ID NO: 8462 - DNA, 25 bp, synthetic construct
  source 1..25: mol_type = other DNA; mol_type = other DNA
ccctgccctgcaactgctgcaacta

SEQ ID NO: 8463 - DNA, 25 bp, synthetic construct
  source 1..25: mol_type = other DNA; mol_type = other DNA
accctgccctgcaactgctgcagct

SEQ ID NO: 8464 - DNA, 25 bp, synthetic construct
  source 1..25: mol_type = other DNA; mol_type = other DNA
accctgccctgcaactgctgcaact

SEQ ID NO: 8465 - DNA, 25 bp, synthetic construct
  source 1..25: mol_type = other DNA; mol_type = other DNA
accctgccctgcaactgctacaact

SEQ ID NO: 8466 - DNA, 25 bp, synthetic construct
  source 1..25: mol_type = other DNA; mol_type = other DNA
gaccctgccctgcaactgctgcaac

SEQ ID NO: 8467 - DNA, 25 bp, synthetic construct
  source 1..25: mol_type = other DNA; mol_type = other DNA
gaccctgccctgcaactgctacaac

SEQ ID NO: 8468 - DNA, 25 bp, synthetic construct
  source 1..25: mol_type = other DNA; mol_type = other DNA
tgaccctgccctgcaactgctgcag

SEQ ID NO: 8469 - DNA, 25 bp, synthetic construct
  source 1..25: mol_type = other DNA; mol_type = other DNA
tgaccctgccctgcaactgctgcaa

SEQ ID NO: 8470 - DNA, 25 bp, synthetic construct
  source 1..25: mol_type = other DNA; mol_type = other DNA
tgaccctgccctgcaactgctacaa

SEQ ID NO: 8471 - DNA, 25 bp, synthetic construct
  source 1..25: mol_type = other DNA; mol_type = other DNA
ctgaccctgccctgcaactgctgca

SEQ ID NO: 8472 - DNA, 25 bp, synthetic construct
  source 1..25: mol_type = other DNA; mol_type = other DNA
ctgaccctgccctgcaactgctaca

SEQ ID NO: 8473 - DNA, 25 bp, synthetic construct
  source 1..25: mol_type = other DNA; mol_type = other DNA
ctgaccctgccctgcaactactaca

SEQ ID NO: 8474 - DNA, 25 bp, synthetic construct
  source 1..25: mol_type = other DNA; mol_type = other DNA
cctgaccctgccctgcaactgctac

SEQ ID NO: 8475 - DNA, 25 bp, synthetic construct
  source 1..25: mol_type = other DNA; mol_type = other DNA
cctgaccctgccctgcaactactac

SEQ ID NO: 8476 - DNA, 25 bp, synthetic construct
  source 1..25: mol_type = other DNA; mol_type = other DNA
ccctgaccctgccctgcaactgctg

SEQ ID NO: 8477 - DNA, 25 bp, synthetic construct
  source 1..25: mol_type = other DNA; mol_type = other DNA
ccctgaccctgccctgcaactgcta

SEQ ID NO: 8478 - DNA, 25 bp, synthetic construct
  source 1..25: mol_type = other DNA; mol_type = other DNA
ccctgaccctgccctgcaactacta

SEQ ID NO: 8479 - DNA, 25 bp, synthetic construct
  source 1..25: mol_type = other DNA; mol_type = other DNA
cccctgaccctgccctgcaactgct

SEQ ID NO: 8480 - DNA, 25 bp, synthetic construct
  source 1..25: mol_type = other DNA; mol_type = other DNA
cccctgaccctgccctgcaactact

SEQ ID NO: 8481 - DNA, 25 bp, synthetic construct
  source 1..25: mol_type = other DNA; mol_type = other DNA
cccctgaccctgccctacaactact

SEQ ID NO: 8482 - DNA, 25 bp, synthetic construct
  source 1..25: mol_type = other DNA; mol_type = other DNA
tcccctgaccctgccctgcaactac

SEQ ID NO: 8483 - DNA, 25 bp, synthetic construct
  source 1..25: mol_type = other DNA; mol_type = other DNA
tcccctgaccctgccctacaactac

SEQ ID NO: 8484 - DNA, 25 bp, synthetic construct
  source 1..25: mol_type = other DNA; mol_type = other DNA
atcccctgaccctgccctgcaactg

SEQ ID NO: 8485 - DNA, 25 bp, synthetic construct
  source 1..25: mol_type = other DNA; mol_type = other DNA
atcccctgaccctgccctgcaacta

SEQ ID NO: 8486 - DNA, 25 bp, synthetic construct
  source 1..25: mol_type = other DNA; mol_type = other DNA
atcccctgaccctgccctacaacta

SEQ ID NO: 8487 - DNA, 25 bp, synthetic construct
  source 1..25: mol_type = other DNA; mol_type = other DNA
aatcccctgaccctgccctgcaact

SEQ ID NO: 8488 - DNA, 25 bp, synthetic construct
  source 1..25: mol_type = other DNA; mol_type = other DNA
aatcccctgaccctgccctacaact

SEQ ID NO: 8489 - DNA, 25 bp, synthetic construct
  source 1..25: mol_type = other DNA; mol_type = other DNA
aatcccctgaccctaccctacaact

SEQ ID NO: 8490 - DNA, 25 bp, synthetic construct
  source 1..25: mol_type = other DNA; mol_type = other DNA
gaatcccctgaccctgccctacaac

SEQ ID NO: 8491 - DNA, 25 bp, synthetic construct
  source 1..25: mol_type = other DNA; mol_type = other DNA
gaatcccctgaccctaccctacaac

SEQ ID NO: 8492 - DNA, 25 bp, synthetic construct
  source 1..25: mol_type = other DNA; mol_type = other DNA
ggaatcccctgaccctgccctgcaa

SEQ ID NO: 8493 - DNA, 25 bp, synthetic construct
  source 1..25: mol_type = other DNA; mol_type = other DNA
ggaatcccctgaccctgccctacaa

SEQ ID NO: 8494 - DNA, 25 bp, synthetic construct
  source 1..25: mol_type = other DNA; mol_type = other DNA
ggaatcccctgaccctaccctacaa

SEQ ID NO: 8495 - DNA, 25 bp, synthetic construct
  source 1..25: mol_type = other DNA; mol_type = other DNA
aggaatcccctgaccctgccctgca

SEQ ID NO: 8496 - DNA, 25 bp, synthetic construct
  source 1..25: mol_type = other DNA; mol_type = other DNA
aggaatcccctgaccctgccctaca

SEQ ID NO: 8497 - DNA, 25 bp, synthetic construct
  source 1..25: mol_type = other DNA; mol_type = other DNA
aggaatcccctgaccctaccctaca

SEQ ID NO: 8498 - DNA, 25 bp, synthetic construct
  source 1..25: mol_type = other DNA; mol_type = other DNA
gaggaatcccctgaccctgccctac

SEQ ID NO: 8499 - DNA, 25 bp, synthetic construct
  source 1..25: mol_type = other DNA; mol_type = other DNA
gaggaatcccctgaccctaccctac

SEQ ID NO: 8500 - DNA, 25 bp, synthetic construct
  source 1..25: mol_type = other DNA; mol_type = other DNA
tgaggaatcccctgaccctgccctg

SEQ ID NO: 8501 - DNA, 25 bp, synthetic construct
  source 1..25: mol_type = other DNA; mol_type = other DNA
tgaggaatcccctgaccctgcccta

SEQ ID NO: 8502 - DNA, 25 bp, synthetic construct
  source 1..25: mol_type = other DNA; mol_type = other DNA
tgaggaatcccctgaccctacccta

SEQ ID NO: 8503 - DNA, 25 bp, synthetic construct
  source 1..25: mol_type = other DNA; mol_type = other DNA
ctgaggaatcccctgaccctgccct

SEQ ID NO: 8504 - DNA, 25 bp, synthetic construct
  source 1..25: mol_type = other DNA; mol_type = other DNA
ctgaggaatcccctgaccctaccct

SEQ ID NO: 8505 - DNA, 25 bp, synthetic construct
  source 1..25: mol_type = other DNA; mol_type = other DNA
ctgaggaatcccctaaccctaccct

SEQ ID NO: 8506 - DNA, 25 bp, synthetic construct
  source 1..25: mol_type = other DNA; mol_type = other DNA
gctgaggaatcccctgaccctaccc

SEQ ID NO: 8507 - DNA, 25 bp, synthetic construct
  source 1..25: mol_type = other DNA; mol_type = other DNA
gctgaggaatcccctaaccctaccc

SEQ ID NO: 8508 - DNA, 25 bp, synthetic construct
  source 1..25: mol_type = other DNA; mol_type = other DNA
ggctgaggaatcccctgaccctgcc

SEQ ID NO: 8509 - DNA, 25 bp, synthetic construct
  source 1..25: mol_type = other DNA; mol_type = other DNA
ggctgaggaatcccctgaccctacc

SEQ ID NO: 8510 - DNA, 25 bp, synthetic construct
  source 1..25: mol_type = other DNA; mol_type = other DNA
ggctgaggaatcccctaaccctacc

SEQ ID NO: 8511 - DNA, 25 bp, synthetic construct
  source 1..25: mol_type = other DNA; mol_type = other DNA
cggctgaggaatcccctgaccctgc

SEQ ID NO: 8512 - DNA, 25 bp, synthetic construct
  source 1..25: mol_type = other DNA; mol_type = other DNA
cggctgaggaatcccctgaccctac

SEQ ID NO: 8513 - DNA, 25 bp, synthetic construct
  source 1..25: mol_type = other DNA; mol_type = other DNA
cggctgaggaatcccctaaccctac

SEQ ID NO: 8514 - DNA, 25 bp, synthetic construct
  source 1..25: mol_type = other DNA; mol_type = other DNA
ccggctgaggaatcccctgacccta

SEQ ID NO: 8515 - DNA, 25 bp, synthetic construct
  source 1..25: mol_type = other DNA; mol_type = other DNA
ccggctgaggaatcccctaacccta

SEQ ID NO: 8516 - DNA, 25 bp, synthetic construct
  source 1..25: mol_type = other DNA; mol_type = other DNA
tccggctgaggaatcccctgaccct

SEQ ID NO: 8517 - DNA, 25 bp, synthetic construct
  source 1..25: mol_type = other DNA; mol_type = other DNA
tccggctgaggaatcccctaaccct

SEQ ID NO: 8518 - DNA, 25 bp, synthetic construct
  source 1..25: mol_type = other DNA; mol_type = other DNA
tccggctgagaaatcccctaaccct

SEQ ID NO: 8519 - DNA, 25 bp, synthetic construct
  source 1..25: mol_type = other DNA; mol_type = other DNA
ttccggctgaggaatcccctgaccc

SEQ ID NO: 8520 - DNA, 25 bp, synthetic construct
  source 1..25: mol_type = other DNA; mol_type = other DNA
ttccggctgaggaatcccctaaccc

SEQ ID NO: 8521 - DNA, 25 bp, synthetic construct
  source 1..25: mol_type = other DNA; mol_type = other DNA
ttccggctgagaaatcccctaaccc

SEQ ID NO: 8522 - DNA, 25 bp, synthetic construct
  source 1..25: mol_type = other DNA; mol_type = other DNA
gttccggctgaggaatcccctaacc

SEQ ID NO: 8523 - DNA, 25 bp, synthetic construct
  source 1..25: mol_type = other DNA; mol_type = other DNA
gttccggctgagaaatcccctaacc

SEQ ID NO: 8524 - DNA, 25 bp, synthetic construct
  source 1..25: mol_type = other DNA; mol_type = other DNA
ggttccggctgaggaatcccctgac

SEQ ID NO: 8525 - DNA, 25 bp, synthetic construct
  source 1..25: mol_type = other DNA; mol_type = other DNA
ggttccggctgaggaatcccctaac

SEQ ID NO: 8526 - DNA, 25 bp, synthetic construct
  source 1..25: mol_type = other DNA; mol_type = other DNA
ggttccggctgagaaatcccctaac

SEQ ID NO: 8527 - DNA, 25 bp, synthetic construct
  source 1..25: mol_type = other DNA; mol_type = other DNA
aggttccggctgaggaatcccctga

SEQ ID NO: 8528 - DNA, 25 bp, synthetic construct
  source 1..25: mol_type = other DNA; mol_type = other DNA
aggttccggctgaggaatcccctaa

SEQ ID NO: 8529 - DNA, 25 bp, synthetic construct
  source 1..25: mol_type = other DNA; mol_type = other DNA
aggttccggctgagaaatcccctaa

SEQ ID NO: 8530 - DNA, 25 bp, synthetic construct
  source 1..25: mol_type = other DNA; mol_type = other DNA
gaggttccggctgaggaatccccta

SEQ ID NO: 8531 - DNA, 25 bp, synthetic construct
  source 1..25: mol_type = other DNA; mol_type = other DNA
gaggttccggctgagaaatccccta

SEQ ID NO: 8532 - DNA, 25 bp, synthetic construct
  source 1..25: mol_type = other DNA; mol_type = other DNA
agaggttccggctgaggaatcccct

SEQ ID NO: 8533 - DNA, 25 bp, synthetic construct
  source 1..25: mol_type = other DNA; mol_type = other DNA
agaggttccggctgagaaatcccct

SEQ ID NO: 8534 - DNA, 25 bp, synthetic construct
  source 1..25: mol_type = other DNA; mol_type = other DNA
agaggttccggctgaaaaatcccct

SEQ ID NO: 8535 - DNA, 25 bp, synthetic construct
  source 1..25: mol_type = other DNA; mol_type = other DNA
cagaggttccggctgaggaatcccc

SEQ ID NO: 8536 - DNA, 25 bp, synthetic construct
  source 1..25: mol_type = other DNA; mol_type = other DNA
cagaggttccggctgagaaatcccc

SEQ ID NO: 8537 - DNA, 25 bp, synthetic construct
  source 1..25: mol_type = other DNA; mol_type = other DNA
cagaggttccggctgaaaaatcccc

SEQ ID NO: 8538 - DNA, 25 bp, synthetic construct
  source 1..25: mol_type = other DNA; mol_type = other DNA
ccagaggttccggctgagaaatccc

SEQ ID NO: 8539 - DNA, 25 bp, synthetic construct
  source 1..25: mol_type = other DNA; mol_type = other DNA
ccagaggttccggctgaaaaatccc

SEQ ID NO: 8540 - DNA, 25 bp, synthetic construct
  source 1..25: mol_type = other DNA; mol_type = other DNA
gccagaggttccggctgaggaatcc

SEQ ID NO: 8541 - DNA, 25 bp, synthetic construct
  source 1..25: mol_type = other DNA; mol_type = other DNA
gccagaggttccggctgagaaatcc

SEQ ID NO: 8542 - DNA, 25 bp, synthetic construct
  source 1..25: mol_type = other DNA; mol_type = other DNA
gccagaggttccggctgaaaaatcc

SEQ ID NO: 8543 - DNA, 25 bp, synthetic construct
  source 1..25: mol_type = other DNA; mol_type = other DNA
tgccagaggttccggctgaggaatc

SEQ ID NO: 8544 - DNA, 25 bp, synthetic construct
  source 1..25: mol_type = other DNA; mol_type = other DNA
tgccagaggttccggctgagaaatc

SEQ ID NO: 8545 - DNA, 25 bp, synthetic construct
  source 1..25: mol_type = other DNA; mol_type = other DNA
tgccagaggttccggctgaaaaatc

SEQ ID NO: 8546 - DNA, 25 bp, synthetic construct
  source 1..25: mol_type = other DNA; mol_type = other DNA
gtgccagaggttccggctgagaaat

SEQ ID NO: 8547 - DNA, 25 bp, synthetic construct
  source 1..25: mol_type = other DNA; mol_type = other DNA
gtgccagaggttccggctgaaaaat

SEQ ID NO: 8548 - DNA, 18 bp, synthetic construct
  source 1..18: mol_type = other DNA; mol_type = other DNA
tgctccagatgctgcacg

SEQ ID NO: 8549 - DNA, 18 bp, synthetic construct
  source 1..18: mol_type = other DNA; mol_type = other DNA
tgctccagatgctgcaca

SEQ ID NO: 8550 - DNA, 18 bp, synthetic construct
  source 1..18: mol_type = other DNA; mol_type = other DNA
gtgctccagatgctgcac

SEQ ID NO: 8551 - DNA, 18 bp, synthetic construct
  source 1..18: mol_type = other DNA; mol_type = other DNA
gtgctccagatgctacac

SEQ ID NO: 8552 - DNA, 18 bp, synthetic construct
  source 1..18: mol_type = other DNA; mol_type = other DNA
ggtgctccagatgctgca

SEQ ID NO: 8553 - DNA, 18 bp, synthetic construct
  source 1..18: mol_type = other DNA; mol_type = other DNA
ggtgctccagatgctaca

SEQ ID NO: 8554 - DNA, 18 bp, synthetic construct
  source 1..18: mol_type = other DNA; mol_type = other DNA
aggtgctccagatgctgc

SEQ ID NO: 8555 - DNA, 18 bp, synthetic construct
  source 1..18: mol_type = other DNA; mol_type = other DNA
aggtgctccagatgctac

SEQ ID NO: 8556 - DNA, 18 bp, synthetic construct
  source 1..18: mol_type = other DNA; mol_type = other DNA
caggtgctccagatgctg

SEQ ID NO: 8557 - DNA, 18 bp, synthetic construct
  source 1..18: mol_type = other DNA; mol_type = other DNA
caggtgctccagatgcta

SEQ ID NO: 8558 - DNA, 18 bp, synthetic construct
  source 1..18: mol_type = other DNA; mol_type = other DNA
gcaggtgctccagatgct

SEQ ID NO: 8559 - DNA, 18 bp, synthetic construct
  source 1..18: mol_type = other DNA; mol_type = other DNA
gcaggtgctccagatact

SEQ ID NO: 8560 - DNA, 18 bp, synthetic construct
  source 1..18: mol_type = other DNA; mol_type = other DNA
agcaggtgctccagatgc

SEQ ID NO: 8561 - DNA, 18 bp, synthetic construct
  source 1..18: mol_type = other DNA; mol_type = other DNA
agcaggtgctccagatac

SEQ ID NO: 8562 - DNA, 18 bp, synthetic construct
  source 1..18: mol_type = other DNA; mol_type = other DNA
cagcaggtgctccagatg

SEQ ID NO: 8563 - DNA, 18 bp, synthetic construct
  source 1..18: mol_type = other DNA; mol_type = other DNA
cagcaggtgctccagata

SEQ ID NO: 8564 - DNA, 18 bp, synthetic construct
  source 1..18: mol_type = other DNA; mol_type = other DNA
acagcaggtgctccagat

SEQ ID NO: 8565 - DNA, 18 bp, synthetic construct
  source 1..18: mol_type = other DNA; mol_type = other DNA
acagcaggtgctccaaat

SEQ ID NO: 8566 - DNA, 18 bp, synthetic construct
  source 1..18: mol_type = other DNA; mol_type = other DNA
aacagcaggtgctccaga

SEQ ID NO: 8567 - DNA, 18 bp, synthetic construct
  source 1..18: mol_type = other DNA; mol_type = other DNA
aacagcaggtgctccaaa

SEQ ID NO: 8568 - DNA, 18 bp, synthetic construct
  source 1..18: mol_type = other DNA; mol_type = other DNA
gaacagcaggtgctccag

SEQ ID NO: 8569 - DNA, 18 bp, synthetic construct
  source 1..18: mol_type = other DNA; mol_type = other DNA
gaacagcaggtgctccaa

SEQ ID NO: 8570 - DNA, 18 bp, synthetic construct
  source 1..18: mol_type = other DNA; mol_type = other DNA
agaacagcaggtgctcca

SEQ ID NO: 8571 - DNA, 18 bp, synthetic construct
  source 1..18: mol_type = other DNA; mol_type = other DNA
agaacagcaggtactcca

SEQ ID NO: 8572 - DNA, 18 bp, synthetic construct
  source 1..18: mol_type = other DNA; mol_type = other DNA
tagaacagcaggtgctcc

SEQ ID NO: 8573 - DNA, 18 bp, synthetic construct
  source 1..18: mol_type = other DNA; mol_type = other DNA
tagaacagcaggtactcc

SEQ ID NO: 8574 - DNA, 18 bp, synthetic construct
  source 1..18: mol_type = other DNA; mol_type = other DNA
atagaacagcaggtgctc

SEQ ID NO: 8575 - DNA, 18 bp, synthetic construct
  source 1..18: mol_type = other DNA; mol_type = other DNA
atagaacagcaggtactc

SEQ ID NO: 8576 - DNA, 18 bp, synthetic construct
  source 1..18: mol_type = other DNA; mol_type = other DNA
catagaacagcaggtgct

SEQ ID NO: 8577 - DNA, 18 bp, synthetic construct
  source 1..18: mol_type = other DNA; mol_type = other DNA
catagaacagcaggtact

SEQ ID NO: 8578 - DNA, 18 bp, synthetic construct
  source 1..18: mol_type = other DNA; mol_type = other DNA
ccatagaacagcaggtgc

SEQ ID NO: 8579 - DNA, 18 bp, synthetic construct
  source 1..18: mol_type = other DNA; mol_type = other DNA
ccatagaacagcaggtac

SEQ ID NO: 8580 - DNA, 18 bp, synthetic construct
  source 1..18: mol_type = other DNA; mol_type = other DNA
cccatagaacagcaggtg

SEQ ID NO: 8581 - DNA, 18 bp, synthetic construct
  source 1..18: mol_type = other DNA; mol_type = other DNA
cccatagaacagcaggta

SEQ ID NO: 8582 - DNA, 18 bp, synthetic construct
  source 1..18: mol_type = other DNA; mol_type = other DNA
ccccatagaacagcaggt

SEQ ID NO: 8583 - DNA, 18 bp, synthetic construct
  source 1..18: mol_type = other DNA; mol_type = other DNA
ccccatagaacagcagat

SEQ ID NO: 8584 - DNA, 18 bp, synthetic construct
  source 1..18: mol_type = other DNA; mol_type = other DNA
gccccatagaacagcagg

SEQ ID NO: 8585 - DNA, 18 bp, synthetic construct
  source 1..18: mol_type = other DNA; mol_type = other DNA
gccccatagaacagcaga

SEQ ID NO: 8586 - DNA, 18 bp, synthetic construct
  source 1..18: mol_type = other DNA; mol_type = other DNA
tgccccatagaacagcag

SEQ ID NO: 8587 - DNA, 18 bp, synthetic construct
  source 1..18: mol_type = other DNA; mol_type = other DNA
tgccccatagaacagcaa

SEQ ID NO: 8588 - DNA, 18 bp, synthetic construct
  source 1..18: mol_type = other DNA; mol_type = other DNA
ctgccccatagaacagca

SEQ ID NO: 8589 - DNA, 18 bp, synthetic construct
  source 1..18: mol_type = other DNA; mol_type = other DNA
ctgccccatagaacaaca

SEQ ID NO: 8590 - DNA, 18 bp, synthetic construct
  source 1..18: mol_type = other DNA; mol_type = other DNA
tctgccccatagaacagc

SEQ ID NO: 8591 - DNA, 18 bp, synthetic construct
  source 1..18: mol_type = other DNA; mol_type = other DNA
tctgccccatagaacaac

SEQ ID NO: 8592 - DNA, 18 bp, synthetic construct
  source 1..18: mol_type = other DNA; mol_type = other DNA
gtctgccccatagaacag

SEQ ID NO: 8593 - DNA, 18 bp, synthetic construct
  source 1..18: mol_type = other DNA; mol_type = other DNA
gtctgccccatagaacaa

SEQ ID NO: 8594 - DNA, 18 bp, synthetic construct
  source 1..18: mol_type = other DNA; mol_type = other DNA
tgtctgccccatagaaca

SEQ ID NO: 8595 - DNA, 18 bp, synthetic construct
  source 1..18: mol_type = other DNA; mol_type = other DNA
tgtctgccccataaaaca

SEQ ID NO: 8596 - DNA, 18 bp, synthetic construct
  source 1..18: mol_type = other DNA; mol_type = other DNA
atgtctgccccatagaac

SEQ ID NO: 8597 - DNA, 18 bp, synthetic construct
  source 1..18: mol_type = other DNA; mol_type = other DNA
atgtctgccccataaaac

SEQ ID NO: 8598 - DNA, 18 bp, synthetic construct
  source 1..18: mol_type = other DNA; mol_type = other DNA
catgtctgccccatagaa

SEQ ID NO: 8599 - DNA, 18 bp, synthetic construct
  source 1..18: mol_type = other DNA; mol_type = other DNA
catgtctgccccataaaa

SEQ ID NO: 8600 - DNA, 18 bp, synthetic construct
  source 1..18: mol_type = other DNA; mol_type = other DNA
ccatgtctgccccataga

SEQ ID NO: 8601 - DNA, 18 bp, synthetic construct
  source 1..18: mol_type = other DNA; mol_type = other DNA
ccatgtctgccccataaa

SEQ ID NO: 8602 - DNA, 18 bp, synthetic construct
  source 1..18: mol_type = other DNA; mol_type = other DNA
cccatgtctgccccatag

SEQ ID NO: 8603 - DNA, 18 bp, synthetic construct
  source 1..18: mol_type = other DNA; mol_type = other DNA
cccatgtctgccccataa

SEQ ID NO: 8604 - DNA, 18 bp, synthetic construct
  source 1..18: mol_type = other DNA; mol_type = other DNA
ccccatgtctgccccata

SEQ ID NO: 8605 - DNA, 18 bp, synthetic construct
  source 1..18: mol_type = other DNA; mol_type = other DNA
ccccatgtctaccccata

SEQ ID NO: 8606 - DNA, 18 bp, synthetic construct
  source 1..18: mol_type = other DNA; mol_type = other DNA
cccccatgtctgccccat

SEQ ID NO: 8607 - DNA, 18 bp, synthetic construct
  source 1..18: mol_type = other DNA; mol_type = other DNA
cccccatgtctaccccat

SEQ ID NO: 8608 - DNA, 18 bp, synthetic construct
  source 1..18: mol_type = other DNA; mol_type = other DNA
gcccccatgtctgcccca

SEQ ID NO: 8609 - DNA, 18 bp, synthetic construct
  source 1..18: mol_type = other DNA; mol_type = other DNA
gcccccatgtctacccca

SEQ ID NO: 8610 - DNA, 18 bp, synthetic construct
  source 1..18: mol_type = other DNA; mol_type = other DNA
ggcccccatgtctgcccc

SEQ ID NO: 8611 - DNA, 18 bp, synthetic construct
  source 1..18: mol_type = other DNA; mol_type = other DNA
ggcccccatgtctacccc

SEQ ID NO: 8612 - DNA, 18 bp, synthetic construct
  source 1..18: mol_type = other DNA; mol_type = other DNA
gggcccccatgtctgccc

SEQ ID NO: 8613 - DNA, 18 bp, synthetic construct
  source 1..18: mol_type = other DNA; mol_type = other DNA
gggcccccatgtctaccc

SEQ ID NO: 8614 - DNA, 18 bp, synthetic construct
  source 1..18: mol_type = other DNA; mol_type = other DNA
tgggcccccatgtctgcc

SEQ ID NO: 8615 - DNA, 18 bp, synthetic construct
  source 1..18: mol_type = other DNA; mol_type = other DNA
tgggcccccatgtctacc

SEQ ID NO: 8616 - DNA, 18 bp, synthetic construct
  source 1..18: mol_type = other DNA; mol_type = other DNA
ctgggcccccatgtctgc

SEQ ID NO: 8617 - DNA, 18 bp, synthetic construct
  source 1..18: mol_type = other DNA; mol_type = other DNA
ctgggcccccatgtctac

SEQ ID NO: 8618 - DNA, 18 bp, synthetic construct
  source 1..18: mol_type = other DNA; mol_type = other DNA
tctgggcccccatgtctg

SEQ ID NO: 8619 - DNA, 18 bp, synthetic construct
  source 1..18: mol_type = other DNA; mol_type = other DNA
tctgggcccccatgtcta

SEQ ID NO: 8620 - DNA, 18 bp, synthetic construct
  source 1..18: mol_type = other DNA; mol_type = other DNA
ttctgggcccccatgtct

SEQ ID NO: 8621 - DNA, 18 bp, synthetic construct
  source 1..18: mol_type = other DNA; mol_type = other DNA
ttctgggcccccatatct

SEQ ID NO: 8622 - DNA, 18 bp, synthetic construct
  source 1..18: mol_type = other DNA; mol_type = other DNA
gttctgggcccccatgtc

SEQ ID NO: 8623 - DNA, 18 bp, synthetic construct
  source 1..18: mol_type = other DNA; mol_type = other DNA
gttctgggcccccatatc

SEQ ID NO: 8624 - DNA, 18 bp, synthetic construct
  source 1..18: mol_type = other DNA; mol_type = other DNA
cgttctgggcccccatgt

SEQ ID NO: 8625 - DNA, 18 bp, synthetic construct
  source 1..18: mol_type = other DNA; mol_type = other DNA
cgttctgggcccccatat

SEQ ID NO: 8626 - DNA, 18 bp, synthetic construct
  source 1..18: mol_type = other DNA; mol_type = other DNA
gcgttctgggcccccatg

SEQ ID NO: 8627 - DNA, 18 bp, synthetic construct
  source 1..18: mol_type = other DNA; mol_type = other DNA
gcgttctgggcccccata

SEQ ID NO: 8628 - DNA, 18 bp, synthetic construct
  source 1..18: mol_type = other DNA; mol_type = other DNA
ggcgttctgggcccccat

SEQ ID NO: 8629 - DNA, 18 bp, synthetic construct
  source 1..18: mol_type = other DNA; mol_type = other DNA
ggcgttctggacccccat

SEQ ID NO: 8630 - DNA, 18 bp, synthetic construct
  source 1..18: mol_type = other DNA; mol_type = other DNA
aggcgttctgggccccca

SEQ ID NO: 8631 - DNA, 18 bp, synthetic construct
  source 1..18: mol_type = other DNA; mol_type = other DNA
aggcgttctggaccccca

SEQ ID NO: 8632 - DNA, 18 bp, synthetic construct
  source 1..18: mol_type = other DNA; mol_type = other DNA
gaggcgttctgggccccc

SEQ ID NO: 8633 - DNA, 18 bp, synthetic construct
  source 1..18: mol_type = other DNA; mol_type = other DNA
gaggcgttctggaccccc

SEQ ID NO: 8634 - DNA, 18 bp, synthetic construct
  source 1..18: mol_type = other DNA; mol_type = other DNA
cgaggcgttctgggcccc

SEQ ID NO: 8635 - DNA, 18 bp, synthetic construct
  source 1..18: mol_type = other DNA; mol_type = other DNA
cgaggcgttctggacccc

SEQ ID NO: 8636 - DNA, 18 bp, synthetic construct
  source 1..18: mol_type = other DNA; mol_type = other DNA
ccgaggcgttctgggccc

SEQ ID NO: 8637 - DNA, 18 bp, synthetic construct
  source 1..18: mol_type = other DNA; mol_type = other DNA
ccgaggcgttctggaccc

SEQ ID NO: 8638 - DNA, 18 bp, synthetic construct
  source 1..18: mol_type = other DNA; mol_type = other DNA
cccgaggcgttctgggcc

SEQ ID NO: 8639 - DNA, 18 bp, synthetic construct
  source 1..18: mol_type = other DNA; mol_type = other DNA
cccgaggcgttctggacc

SEQ ID NO: 8640 - DNA, 18 bp, synthetic construct
  source 1..18: mol_type = other DNA; mol_type = other DNA
ccccgaggcgttctgggc

SEQ ID NO: 8641 - DNA, 18 bp, synthetic construct
  source 1..18: mol_type = other DNA; mol_type = other DNA
ccccgaggcgttctggac

SEQ ID NO: 8642 - DNA, 18 bp, synthetic construct
  source 1..18: mol_type = other DNA; mol_type = other DNA
tccccgaggcgttctggg

SEQ ID NO: 8643 - DNA, 18 bp, synthetic construct
  source 1..18: mol_type = other DNA; mol_type = other DNA
tccccgaggcgttctgga

SEQ ID NO: 8644 - DNA, 18 bp, synthetic construct
  source 1..18: mol_type = other DNA; mol_type = other DNA
ttccccgaggcgttctgg

SEQ ID NO: 8645 - DNA, 18 bp, synthetic construct
  source 1..18: mol_type = other DNA; mol_type = other DNA
ttccccgaggcgttctga

SEQ ID NO: 8646 - DNA, 18 bp, synthetic construct
  source 1..18: mol_type = other DNA; mol_type = other DNA
gttccccgaggcgttctg

SEQ ID NO: 8647 - DNA, 18 bp, synthetic construct
  source 1..18: mol_type = other DNA; mol_type = other DNA
gttccccgaggcgttcta

SEQ ID NO: 8648 - DNA, 18 bp, synthetic construct
  source 1..18: mol_type = other DNA; mol_type = other DNA
tgttccccgaggcgttct

SEQ ID NO: 8649 - DNA, 18 bp, synthetic construct
  source 1..18: mol_type = other DNA; mol_type = other DNA
tgttccccgaggcattct

SEQ ID NO: 8650 - DNA, 18 bp, synthetic construct
  source 1..18: mol_type = other DNA; mol_type = other DNA
gtgttccccgaggcgttc

SEQ ID NO: 8651 - DNA, 18 bp, synthetic construct
  source 1..18: mol_type = other DNA; mol_type = other DNA
gtgttccccgaggcattc

SEQ ID NO: 8652 - DNA, 18 bp, synthetic construct
  source 1..18: mol_type = other DNA; mol_type = other DNA
tgtgttccccgaggcgtt

SEQ ID NO: 8653 - DNA, 18 bp, synthetic construct
  source 1..18: mol_type = other DNA; mol_type = other DNA
tgtgttccccgaggcatt

SEQ ID NO: 8654 - DNA, 18 bp, synthetic construct
  source 1..18: mol_type = other DNA; mol_type = other DNA
ctgtgttccccgaggcgt

SEQ ID NO: 8655 - DNA, 18 bp, synthetic construct
  source 1..18: mol_type = other DNA; mol_type = other DNA
ctgtgttccccgaggcat

SEQ ID NO: 8656 - DNA, 18 bp, synthetic construct
  source 1..18: mol_type = other DNA; mol_type = other DNA
gctgtgttccccgaggcg

SEQ ID NO: 8657 - DNA, 18 bp, synthetic construct
  source 1..18: mol_type = other DNA; mol_type = other DNA
gctgtgttccccgaggca

SEQ ID NO: 8658 - DNA, 18 bp, synthetic construct
  source 1..18: mol_type = other DNA; mol_type = other DNA
ggctgtgttccccgaggc

SEQ ID NO: 8659 - DNA, 18 bp, synthetic construct
  source 1..18: mol_type = other DNA; mol_type = other DNA
ggctgtgttccccgagac

SEQ ID NO: 8660 - DNA, 18 bp, synthetic construct
  source 1..18: mol_type = other DNA; mol_type = other DNA
gggctgtgttccccgagg

SEQ ID NO: 8661 - DNA, 18 bp, synthetic construct
  source 1..18: mol_type = other DNA; mol_type = other DNA
gggctgtgttccccgaga

SEQ ID NO: 8662 - DNA, 18 bp, synthetic construct
  source 1..18: mol_type = other DNA; mol_type = other DNA
agggctgtgttccccgag

SEQ ID NO: 8663 - DNA, 18 bp, synthetic construct
  source 1..18: mol_type = other DNA; mol_type = other DNA
agggctgtgttccccgaa

SEQ ID NO: 8664 - DNA, 18 bp, synthetic construct
  source 1..18: mol_type = other DNA; mol_type = other DNA
cagggctgtgttccccga

SEQ ID NO: 8665 - DNA, 18 bp, synthetic construct
  source 1..18: mol_type = other DNA; mol_type = other DNA
cagggctgtgttccccaa

SEQ ID NO: 8666 - DNA, 18 bp, synthetic construct
  source 1..18: mol_type = other DNA; mol_type = other DNA
gcagggctgtgttccccg

SEQ ID NO: 8667 - DNA, 18 bp, synthetic construct
  source 1..18: mol_type = other DNA; mol_type = other DNA
gcagggctgtgttcccca

SEQ ID NO: 8668 - DNA, 18 bp, synthetic construct
  source 1..18: mol_type = other DNA; mol_type = other DNA
tgcagggctgtgttcccc

SEQ ID NO: 8669 - DNA, 18 bp, synthetic construct
  source 1..18: mol_type = other DNA; mol_type = other DNA
tgcagggctgtattcccc

SEQ ID NO: 8670 - DNA, 18 bp, synthetic construct
  source 1..18: mol_type = other DNA; mol_type = other DNA
gtgcagggctgtgttccc

SEQ ID NO: 8671 - DNA, 18 bp, synthetic construct
  source 1..18: mol_type = other DNA; mol_type = other DNA
gtgcagggctgtattccc

SEQ ID NO: 8672 - DNA, 18 bp, synthetic construct
  source 1..18: mol_type = other DNA; mol_type = other DNA
tgtgcagggctgtgttcc

SEQ ID NO: 8673 - DNA, 18 bp, synthetic construct
  source 1..18: mol_type = other DNA; mol_type = other DNA
tgtgcagggctgtattcc

SEQ ID NO: 8674 - DNA, 18 bp, synthetic construct
  source 1..18: mol_type = other DNA; mol_type = other DNA
atgtgcagggctgtgttc

SEQ ID NO: 8675 - DNA, 18 bp, synthetic construct
  source 1..18: mol_type = other DNA; mol_type = other DNA
atgtgcagggctgtattc

SEQ ID NO: 8676 - DNA, 18 bp, synthetic construct
  source 1..18: mol_type = other DNA; mol_type = other DNA
gatgtgcagggctgtgtt

SEQ ID NO: 8677 - DNA, 18 bp, synthetic construct
  source 1..18: mol_type = other DNA; mol_type = other DNA
gatgtgcagggctgtatt

SEQ ID NO: 8678 - DNA, 18 bp, synthetic construct
  source 1..18: mol_type = other DNA; mol_type = other DNA
agatgtgcagggctgtgt

SEQ ID NO: 8679 - DNA, 18 bp, synthetic construct
  source 1..18: mol_type = other DNA; mol_type = other DNA
agatgtgcagggctgtat

SEQ ID NO: 8680 - DNA, 18 bp, synthetic construct
  source 1..18: mol_type = other DNA; mol_type = other DNA
cagatgtgcagggctgtg

SEQ ID NO: 8681 - DNA, 18 bp, synthetic construct
  source 1..18: mol_type = other DNA; mol_type = other DNA
cagatgtgcagggctgta

SEQ ID NO: 8682 - DNA, 18 bp, synthetic construct
  source 1..18: mol_type = other DNA; mol_type = other DNA
acagatgtgcagggctgt

SEQ ID NO: 8683 - DNA, 18 bp, synthetic construct
  source 1..18: mol_type = other DNA; mol_type = other DNA
acagatgtgcagggctat

SEQ ID NO: 8684 - DNA, 18 bp, synthetic construct
  source 1..18: mol_type = other DNA; mol_type = other DNA
cacagatgtgcagggctg

SEQ ID NO: 8685 - DNA, 18 bp, synthetic construct
  source 1..18: mol_type = other DNA; mol_type = other DNA
cacagatgtgcagggcta

SEQ ID NO: 8686 - DNA, 18 bp, synthetic construct
  source 1..18: mol_type = other DNA; mol_type = other DNA
gcacagatgtgcagggct

SEQ ID NO: 8687 - DNA, 18 bp, synthetic construct
  source 1..18: mol_type = other DNA; mol_type = other DNA
gcacagatgtgcaggact

SEQ ID NO: 8688 - DNA, 18 bp, synthetic construct
  source 1..18: mol_type = other DNA; mol_type = other DNA
ggcacagatgtgcagggc

SEQ ID NO: 8689 - DNA, 18 bp, synthetic construct
  source 1..18: mol_type = other DNA; mol_type = other DNA
ggcacagatgtgcaggac

SEQ ID NO: 8690 - DNA, 18 bp, synthetic construct
  source 1..18: mol_type = other DNA; mol_type = other DNA
gggcacagatgtgcaggg

SEQ ID NO: 8691 - DNA, 18 bp, synthetic construct
  source 1..18: mol_type = other DNA; mol_type = other DNA
gggcacagatgtgcagga

SEQ ID NO: 8692 - DNA, 18 bp, synthetic construct
  source 1..18: mol_type = other DNA; mol_type = other DNA
agggcacagatgtgcagg

SEQ ID NO: 8693 - DNA, 18 bp, synthetic construct
  source 1..18: mol_type = other DNA; mol_type = other DNA
agggcacagatgtgcaga

SEQ ID NO: 8694 - DNA, 18 bp, synthetic construct
  source 1..18: mol_type = other DNA; mol_type = other DNA
gagggcacagatgtgcag

SEQ ID NO: 8695 - DNA, 18 bp, synthetic construct
  source 1..18: mol_type = other DNA; mol_type = other DNA
gagggcacagatgtgcaa

SEQ ID NO: 8696 - DNA, 18 bp, synthetic construct
  source 1..18: mol_type = other DNA; mol_type = other DNA
agagggcacagatgtgca

SEQ ID NO: 8697 - DNA, 18 bp, synthetic construct
  source 1..18: mol_type = other DNA; mol_type = other DNA
agagggcacagatgtaca

SEQ ID NO: 8698 - DNA, 18 bp, synthetic construct
  source 1..18: mol_type = other DNA; mol_type = other DNA
tagagggcacagatgtgc

SEQ ID NO: 8699 - DNA, 18 bp, synthetic construct
  source 1..18: mol_type = other DNA; mol_type = other DNA
tagagggcacagatgtac

SEQ ID NO: 8700 - DNA, 18 bp, synthetic construct
  source 1..18: mol_type = other DNA; mol_type = other DNA
gtagagggcacagatgtg

SEQ ID NO: 8701 - DNA, 18 bp, synthetic construct
  source 1..18: mol_type = other DNA; mol_type = other DNA
gtagagggcacagatgta

SEQ ID NO: 8702 - DNA, 18 bp, synthetic construct
  source 1..18: mol_type = other DNA; mol_type = other DNA
tgtagagggcacagatgt

SEQ ID NO: 8703 - DNA, 18 bp, synthetic construct
  source 1..18: mol_type = other DNA; mol_type = other DNA
tgtagagggcacagatat

SEQ ID NO: 8704 - DNA, 18 bp, synthetic construct
  source 1..18: mol_type = other DNA; mol_type = other DNA
ttgtagagggcacagatg

SEQ ID NO: 8705 - DNA, 18 bp, synthetic construct
  source 1..18: mol_type = other DNA; mol_type = other DNA
ttgtagagggcacagata

SEQ ID NO: 8706 - DNA, 18 bp, synthetic construct
  source 1..18: mol_type = other DNA; mol_type = other DNA
gttgtagagggcacagat

SEQ ID NO: 8707 - DNA, 18 bp, synthetic construct
  source 1..18: mol_type = other DNA; mol_type = other DNA
gttgtagagggcacaaat

SEQ ID NO: 8708 - DNA, 18 bp, synthetic construct
  source 1..18: mol_type = other DNA; mol_type = other DNA
ggttgtagagggcacaga

SEQ ID NO: 8709 - DNA, 18 bp, synthetic construct
  source 1..18: mol_type = other DNA; mol_type = other DNA
ggttgtagagggcacaaa

SEQ ID NO: 8710 - DNA, 18 bp, synthetic construct
  source 1..18: mol_type = other DNA; mol_type = other DNA
tggttgtagagggcacag

SEQ ID NO: 8711 - DNA, 18 bp, synthetic construct
  source 1..18: mol_type = other DNA; mol_type = other DNA
tggttgtagagggcacaa

SEQ ID NO: 8712 - DNA, 18 bp, synthetic construct
  source 1..18: mol_type = other DNA; mol_type = other DNA
ctggttgtagagggcaca

SEQ ID NO: 8713 - DNA, 18 bp, synthetic construct
  source 1..18: mol_type = other DNA; mol_type = other DNA
ctggttgtagaggacaca

SEQ ID NO: 8714 - DNA, 18 bp, synthetic construct
  source 1..18: mol_type = other DNA; mol_type = other DNA
cctggttgtagagggcac

SEQ ID NO: 8715 - DNA, 18 bp, synthetic construct
  source 1..18: mol_type = other DNA; mol_type = other DNA
cctggttgtagaggacac

SEQ ID NO: 8716 - DNA, 18 bp, synthetic construct
  source 1..18: mol_type = other DNA; mol_type = other DNA
acctggttgtagagggca

SEQ ID NO: 8717 - DNA, 18 bp, synthetic construct
  source 1..18: mol_type = other DNA; mol_type = other DNA
acctggttgtagaggaca

SEQ ID NO: 8718 - DNA, 18 bp, synthetic construct
  source 1..18: mol_type = other DNA; mol_type = other DNA
cacctggttgtagagggc

SEQ ID NO: 8719 - DNA, 18 bp, synthetic construct
  source 1..18: mol_type = other DNA; mol_type = other DNA
cacctggttgtagaggac

SEQ ID NO: 8720 - DNA, 18 bp, synthetic construct
  source 1..18: mol_type = other DNA; mol_type = other DNA
gcacctggttgtagaggg

SEQ ID NO: 8721 - DNA, 18 bp, synthetic construct
  source 1..18: mol_type = other DNA; mol_type = other DNA
gcacctggttgtagagga

SEQ ID NO: 8722 - DNA, 18 bp, synthetic construct
  source 1..18: mol_type = other DNA; mol_type = other DNA
cgcacctggttgtagagg

SEQ ID NO: 8723 - DNA, 18 bp, synthetic construct
  source 1..18: mol_type = other DNA; mol_type = other DNA
cgcacctggttgtagaga

SEQ ID NO: 8724 - DNA, 18 bp, synthetic construct
  source 1..18: mol_type = other DNA; mol_type = other DNA
tcgcacctggttgtagag

SEQ ID NO: 8725 - DNA, 18 bp, synthetic construct
  source 1..18: mol_type = other DNA; mol_type = other DNA
tcgcacctggttgtagaa

SEQ ID NO: 8726 - DNA, 18 bp, synthetic construct
  source 1..18: mol_type = other DNA; mol_type = other DNA
gtcgcacctggttgtaga

SEQ ID NO: 8727 - DNA, 18 bp, synthetic construct
  source 1..18: mol_type = other DNA; mol_type = other DNA
gtcgcacctggttgtaaa

SEQ ID NO: 8728 - DNA, 18 bp, synthetic construct
  source 1..18: mol_type = other DNA; mol_type = other DNA
agtcgcacctggttgtag

SEQ ID NO: 8729 - DNA, 18 bp, synthetic construct
  source 1..18: mol_type = other DNA; mol_type = other DNA
agtcgcacctggttgtaa

SEQ ID NO: 8730 - DNA, 18 bp, synthetic construct
  source 1..18: mol_type = other DNA; mol_type = other DNA
cagtcgcacctggttgta

SEQ ID NO: 8731 - DNA, 18 bp, synthetic construct
  source 1..18: mol_type = other DNA; mol_type = other DNA
cagtcgcacctggttata

SEQ ID NO: 8732 - DNA, 18 bp, synthetic construct
  source 1..18: mol_type = other DNA; mol_type = other DNA
acagtcgcacctggttgt

SEQ ID NO: 8733 - DNA, 18 bp, synthetic construct
  source 1..18: mol_type = other DNA; mol_type = other DNA
acagtcgcacctggttat

SEQ ID NO: 8734 - DNA, 18 bp, synthetic construct
  source 1..18: mol_type = other DNA; mol_type = other DNA
cacagtcgcacctggttg

SEQ ID NO: 8735 - DNA, 18 bp, synthetic construct
  source 1..18: mol_type = other DNA; mol_type = other DNA
cacagtcgcacctggtta

SEQ ID NO: 8736 - DNA, 18 bp, synthetic construct
  source 1..18: mol_type = other DNA; mol_type = other DNA
acacagtcgcacctggtt

SEQ ID NO: 8737 - DNA, 18 bp, synthetic construct
  source 1..18: mol_type = other DNA; mol_type = other DNA
acacagtcgcacctgatt

SEQ ID NO: 8738 - DNA, 18 bp, synthetic construct
  source 1..18: mol_type = other DNA; mol_type = other DNA
cacacagtcgcacctggt

SEQ ID NO: 8739 - DNA, 18 bp, synthetic construct
  source 1..18: mol_type = other DNA; mol_type = other DNA
cacacagtcgcacctgat

SEQ ID NO: 8740 - DNA, 18 bp, synthetic construct
  source 1..18: mol_type = other DNA; mol_type = other DNA
acacacagtcgcacctgg

SEQ ID NO: 8741 - DNA, 18 bp, synthetic construct
  source 1..18: mol_type = other DNA; mol_type = other DNA
acacacagtcgcacctga

SEQ ID NO: 8742 - DNA, 18 bp, synthetic construct
  source 1..18: mol_type = other DNA; mol_type = other DNA
gacacacagtcgcacctg

SEQ ID NO: 8743 - DNA, 18 bp, synthetic construct
  source 1..18: mol_type = other DNA; mol_type = other DNA
gacacacagtcgcaccta

SEQ ID NO: 8744 - DNA, 18 bp, synthetic construct
  source 1..18: mol_type = other DNA; mol_type = other DNA
ggacacacagtcgcacct

SEQ ID NO: 8745 - DNA, 18 bp, synthetic construct
  source 1..18: mol_type = other DNA; mol_type = other DNA
ggacacacagtcacacct

SEQ ID NO: 8746 - DNA, 18 bp, synthetic construct
  source 1..18: mol_type = other DNA; mol_type = other DNA
aggacacacagtcgcacc

SEQ ID NO: 8747 - DNA, 18 bp, synthetic construct
  source 1..18: mol_type = other DNA; mol_type = other DNA
aggacacacagtcacacc

SEQ ID NO: 8748 - DNA, 18 bp, synthetic construct
  source 1..18: mol_type = other DNA; mol_type = other DNA
caggacacacagtcgcac

SEQ ID NO: 8749 - DNA, 18 bp, synthetic construct
  source 1..18: mol_type = other DNA; mol_type = other DNA
caggacacacagtcacac

SEQ ID NO: 8750 - DNA, 18 bp, synthetic construct
  source 1..18: mol_type = other DNA; mol_type = other DNA
gcaggacacacagtcgca

SEQ ID NO: 8751 - DNA, 18 bp, synthetic construct
  source 1..18: mol_type = other DNA; mol_type = other DNA
gcaggacacacagtcaca

SEQ ID NO: 8752 - DNA, 18 bp, synthetic construct
  source 1..18: mol_type = other DNA; mol_type = other DNA
tgcaggacacacagtcgc

SEQ ID NO: 8753 - DNA, 18 bp, synthetic construct
  source 1..18: mol_type = other DNA; mol_type = other DNA
tgcaggacacacagtcac

SEQ ID NO: 8754 - DNA, 18 bp, synthetic construct
  source 1..18: mol_type = other DNA; mol_type = other DNA
gtgcaggacacacagtcg

SEQ ID NO: 8755 - DNA, 18 bp, synthetic construct
  source 1..18: mol_type = other DNA; mol_type = other DNA
gtgcaggacacacagtca

SEQ ID NO: 8756 - DNA, 18 bp, synthetic construct
  source 1..18: mol_type = other DNA; mol_type = other DNA
tgtgcaggacacacagtc

SEQ ID NO: 8757 - DNA, 18 bp, synthetic construct
  source 1..18: mol_type = other DNA; mol_type = other DNA
tgtgcaggacacacaatc

SEQ ID NO: 8758 - DNA, 18 bp, synthetic construct
  source 1..18: mol_type = other DNA; mol_type = other DNA
atgtgcaggacacacagt

SEQ ID NO: 8759 - DNA, 18 bp, synthetic construct
  source 1..18: mol_type = other DNA; mol_type = other DNA
atgtgcaggacacacaat

SEQ ID NO: 8760 - DNA, 18 bp, synthetic construct
  source 1..18: mol_type = other DNA; mol_type = other DNA
catgtgcaggacacacag

SEQ ID NO: 8761 - DNA, 18 bp, synthetic construct
  source 1..18: mol_type = other DNA; mol_type = other DNA
catgtgcaggacacacaa

SEQ ID NO: 8762 - DNA, 18 bp, synthetic construct
  source 1..18: mol_type = other DNA; mol_type = other DNA
gcatgtgcaggacacaca

SEQ ID NO: 8763 - DNA, 18 bp, synthetic construct
  source 1..18: mol_type = other DNA; mol_type = other DNA
gcatgtgcagaacacaca

SEQ ID NO: 8764 - DNA, 18 bp, synthetic construct
  source 1..18: mol_type = other DNA; mol_type = other DNA
ggcatgtgcaggacacac

SEQ ID NO: 8765 - DNA, 18 bp, synthetic construct
  source 1..18: mol_type = other DNA; mol_type = other DNA
ggcatgtgcagaacacac

SEQ ID NO: 8766 - DNA, 18 bp, synthetic construct
  source 1..18: mol_type = other DNA; mol_type = other DNA
aggcatgtgcaggacaca

SEQ ID NO: 8767 - DNA, 18 bp, synthetic construct
  source 1..18: mol_type = other DNA; mol_type = other DNA
aggcatgtgcagaacaca

SEQ ID NO: 8768 - DNA, 18 bp, synthetic construct
  source 1..18: mol_type = other DNA; mol_type = other DNA
caggcatgtgcaggacac

SEQ ID NO: 8769 - DNA, 18 bp, synthetic construct
  source 1..18: mol_type = other DNA; mol_type = other DNA
caggcatgtgcagaacac

SEQ ID NO: 8770 - DNA, 18 bp, synthetic construct
  source 1..18: mol_type = other DNA; mol_type = other DNA
gcaggcatgtgcaggaca

SEQ ID NO: 8771 - DNA, 18 bp, synthetic construct
  source 1..18: mol_type = other DNA; mol_type = other DNA
gcaggcatgtgcagaaca

SEQ ID NO: 8772 - DNA, 18 bp, synthetic construct
  source 1..18: mol_type = other DNA; mol_type = other DNA
tgcaggcatgtgcaggac

SEQ ID NO: 8773 - DNA, 18 bp, synthetic construct
  source 1..18: mol_type = other DNA; mol_type = other DNA
tgcaggcatgtgcagaac

SEQ ID NO: 8774 - DNA, 18 bp, synthetic construct
  source 1..18: mol_type = other DNA; mol_type = other DNA
gtgcaggcatgtgcagga

SEQ ID NO: 8775 - DNA, 18 bp, synthetic construct
  source 1..18: mol_type = other DNA; mol_type = other DNA
gtgcaggcatgtgcagaa

SEQ ID NO: 8776 - DNA, 18 bp, synthetic construct
  source 1..18: mol_type = other DNA; mol_type = other DNA
ggtgcaggcatgtgcagg

SEQ ID NO: 8777 - DNA, 18 bp, synthetic construct
  source 1..18: mol_type = other DNA; mol_type = other DNA
ggtgcaggcatgtgcaga

SEQ ID NO: 8778 - DNA, 18 bp, synthetic construct
  source 1..18: mol_type = other DNA; mol_type = other DNA
tggtgcaggcatgtgcag

SEQ ID NO: 8779 - DNA, 18 bp, synthetic construct
  source 1..18: mol_type = other DNA; mol_type = other DNA
tggtgcaggcatgtgcaa

SEQ ID NO: 8780 - DNA, 18 bp, synthetic construct
  source 1..18: mol_type = other DNA; mol_type = other DNA
ctggtgcaggcatgtgca

SEQ ID NO: 8781 - DNA, 18 bp, synthetic construct
  source 1..18: mol_type = other DNA; mol_type = other DNA
ctggtgcaggcatgtaca

SEQ ID NO: 8782 - DNA, 18 bp, synthetic construct
  source 1..18: mol_type = other DNA; mol_type = other DNA
gctggtgcaggcatgtgc

SEQ ID NO: 8783 - DNA, 18 bp, synthetic construct
  source 1..18: mol_type = other DNA; mol_type = other DNA
gctggtgcaggcatgtac

SEQ ID NO: 8784 - DNA, 18 bp, synthetic construct
  source 1..18: mol_type = other DNA; mol_type = other DNA
cgctggtgcaggcatgtg

SEQ ID NO: 8785 - DNA, 18 bp, synthetic construct
  source 1..18: mol_type = other DNA; mol_type = other DNA
cgctggtgcaggcatgta

SEQ ID NO: 8786 - DNA, 18 bp, synthetic construct
  source 1..18: mol_type = other DNA; mol_type = other DNA
tcgctggtgcaggcatgt

SEQ ID NO: 8787 - DNA, 18 bp, synthetic construct
  source 1..18: mol_type = other DNA; mol_type = other DNA
tcgctggtgcaggcatat

SEQ ID NO: 8788 - DNA, 18 bp, synthetic construct
  source 1..18: mol_type = other DNA; mol_type = other DNA
ctcgctggtgcaggcatg

SEQ ID NO: 8789 - DNA, 18 bp, synthetic construct
  source 1..18: mol_type = other DNA; mol_type = other DNA
ctcgctggtgcaggcata

SEQ ID NO: 8790 - DNA, 18 bp, synthetic construct
  source 1..18: mol_type = other DNA; mol_type = other DNA
actcgctggtgcaggcat

SEQ ID NO: 8791 - DNA, 18 bp, synthetic construct
  source 1..18: mol_type = other DNA; mol_type = other DNA
actcgctggtgcagacat

SEQ ID NO: 8792 - DNA, 18 bp, synthetic construct
  source 1..18: mol_type = other DNA; mol_type = other DNA
cactcgctggtgcaggca

SEQ ID NO: 8793 - DNA, 18 bp, synthetic construct
  source 1..18: mol_type = other DNA; mol_type = other DNA
cactcgctggtgcagaca

SEQ ID NO: 8794 - DNA, 18 bp, synthetic construct
  source 1..18: mol_type = other DNA; mol_type = other DNA
acactcgctggtgcaggc

SEQ ID NO: 8795 - DNA, 18 bp, synthetic construct
  source 1..18: mol_type = other DNA; mol_type = other DNA
acactcgctggtgcagac

SEQ ID NO: 8796 - DNA, 18 bp, synthetic construct
  source 1..18: mol_type = other DNA; mol_type = other DNA
cacactcgctggtgcagg

SEQ ID NO: 8797 - DNA, 18 bp, synthetic construct
  source 1..18: mol_type = other DNA; mol_type = other DNA
cacactcgctggtgcaga

SEQ ID NO: 8798 - DNA, 18 bp, synthetic construct
  source 1..18: mol_type = other DNA; mol_type = other DNA
gcacactcgctggtgcag

SEQ ID NO: 8799 - DNA, 18 bp, synthetic construct
  source 1..18: mol_type = other DNA; mol_type = other DNA
gcacactcgctggtgcaa

SEQ ID NO: 8800 - DNA, 18 bp, synthetic construct
  source 1..18: mol_type = other DNA; mol_type = other DNA
tgcacactcgctggtgca

SEQ ID NO: 8801 - DNA, 18 bp, synthetic construct
  source 1..18: mol_type = other DNA; mol_type = other DNA
tgcacactcgctggtaca

SEQ ID NO: 8802 - DNA, 18 bp, synthetic construct
  source 1..18: mol_type = other DNA; mol_type = other DNA
atgcacactcgctggtgc

SEQ ID NO: 8803 - DNA, 18 bp, synthetic construct
  source 1..18: mol_type = other DNA; mol_type = other DNA
atgcacactcgctggtac

SEQ ID NO: 8804 - DNA, 18 bp, synthetic construct
  source 1..18: mol_type = other DNA; mol_type = other DNA
tatgcacactcgctggtg

SEQ ID NO: 8805 - DNA, 18 bp, synthetic construct
  source 1..18: mol_type = other DNA; mol_type = other DNA
tatgcacactcgctggta

SEQ ID NO: 8806 - DNA, 18 bp, synthetic construct
  source 1..18: mol_type = other DNA; mol_type = other DNA
atatgcacactcgctggt

SEQ ID NO: 8807 - DNA, 18 bp, synthetic construct
  source 1..18: mol_type = other DNA; mol_type = other DNA
atatgcacactcgctgat

SEQ ID NO: 8808 - DNA, 18 bp, synthetic construct
  source 1..18: mol_type = other DNA; mol_type = other DNA
tatatgcacactcgctgg

SEQ ID NO: 8809 - DNA, 18 bp, synthetic construct
  source 1..18: mol_type = other DNA; mol_type = other DNA
tatatgcacactcgctga

SEQ ID NO: 8810 - DNA, 18 bp, synthetic construct
  source 1..18: mol_type = other DNA; mol_type = other DNA
gtatatgcacactcgctg

SEQ ID NO: 8811 - DNA, 18 bp, synthetic construct
  source 1..18: mol_type = other DNA; mol_type = other DNA
gtatatgcacactcgcta

SEQ ID NO: 8812 - DNA, 18 bp, synthetic construct
  source 1..18: mol_type = other DNA; mol_type = other DNA
agtatatgcacactcgct

SEQ ID NO: 8813 - DNA, 18 bp, synthetic construct
  source 1..18: mol_type = other DNA; mol_type = other DNA
agtatatgcacactcact

SEQ ID NO: 8814 - DNA, 18 bp, synthetic construct
  source 1..18: mol_type = other DNA; mol_type = other DNA
aagtatatgcacactcgc

SEQ ID NO: 8815 - DNA, 18 bp, synthetic construct
  source 1..18: mol_type = other DNA; mol_type = other DNA
aagtatatgcacactcac

SEQ ID NO: 8816 - DNA, 18 bp, synthetic construct
  source 1..18: mol_type = other DNA; mol_type = other DNA
caagtatatgcacactcg

SEQ ID NO: 8817 - DNA, 18 bp, synthetic construct
  source 1..18: mol_type = other DNA; mol_type = other DNA
caagtatatgcacactca

SEQ ID NO: 8818 - DNA, 18 bp, synthetic construct
  source 1..18: mol_type = other DNA; mol_type = other DNA
gcaagtatatgcacactc

SEQ ID NO: 8819 - DNA, 18 bp, synthetic construct
  source 1..18: mol_type = other DNA; mol_type = other DNA
gcaagtatatacacactc

SEQ ID NO: 8820 - DNA, 18 bp, synthetic construct
  source 1..18: mol_type = other DNA; mol_type = other DNA
ggcaagtatatgcacact

SEQ ID NO: 8821 - DNA, 18 bp, synthetic construct
  source 1..18: mol_type = other DNA; mol_type = other DNA
ggcaagtatatacacact

SEQ ID NO: 8822 - DNA, 18 bp, synthetic construct
  source 1..18: mol_type = other DNA; mol_type = other DNA
aggcaagtatatgcacac

SEQ ID NO: 8823 - DNA, 18 bp, synthetic construct
  source 1..18: mol_type = other DNA; mol_type = other DNA
aggcaagtatatacacac

SEQ ID NO: 8824 - DNA, 18 bp, synthetic construct
  source 1..18: mol_type = other DNA; mol_type = other DNA
gaggcaagtatatgcaca

SEQ ID NO: 8825 - DNA, 18 bp, synthetic construct
  source 1..18: mol_type = other DNA; mol_type = other DNA
gaggcaagtatatacaca

SEQ ID NO: 8826 - DNA, 18 bp, synthetic construct
  source 1..18: mol_type = other DNA; mol_type = other DNA
agaggcaagtatatgcac

SEQ ID NO: 8827 - DNA, 18 bp, synthetic construct
  source 1..18: mol_type = other DNA; mol_type = other DNA
agaggcaagtatatacac

SEQ ID NO: 8828 - DNA, 18 bp, synthetic construct
  source 1..18: mol_type = other DNA; mol_type = other DNA
aagaggcaagtatatgca

SEQ ID NO: 8829 - DNA, 18 bp, synthetic construct
  source 1..18: mol_type = other DNA; mol_type = other DNA
aagaggcaagtatataca

SEQ ID NO: 8830 - DNA, 18 bp, synthetic construct
  source 1..18: mol_type = other DNA; mol_type = other DNA
gaagaggcaagtatatgc

SEQ ID NO: 8831 - DNA, 18 bp, synthetic construct
  source 1..18: mol_type = other DNA; mol_type = other DNA
gaagaggcaagtatatac

SEQ ID NO: 8832 - DNA, 18 bp, synthetic construct
  source 1..18: mol_type = other DNA; mol_type = other DNA
agaagaggcaagtatatg

SEQ ID NO: 8833 - DNA, 18 bp, synthetic construct
  source 1..18: mol_type = other DNA; mol_type = other DNA
agaagaggcaagtatata

SEQ ID NO: 8834 - DNA, 18 bp, synthetic construct
  source 1..18: mol_type = other DNA; mol_type = other DNA
cagaagaggcaagtatat

SEQ ID NO: 8835 - DNA, 18 bp, synthetic construct
  source 1..18: mol_type = other DNA; mol_type = other DNA
cagaagaggcaaatatat

SEQ ID NO: 8836 - DNA, 18 bp, synthetic construct
  source 1..18: mol_type = other DNA; mol_type = other DNA
ccagaagaggcaagtata

SEQ ID NO: 8837 - DNA, 18 bp, synthetic construct
  source 1..18: mol_type = other DNA; mol_type = other DNA
ccagaagaggcaaatata

SEQ ID NO: 8838 - DNA, 18 bp, synthetic construct
  source 1..18: mol_type = other DNA; mol_type = other DNA
cccagaagaggcaagtat

SEQ ID NO: 8839 - DNA, 18 bp, synthetic construct
  source 1..18: mol_type = other DNA; mol_type = other DNA
cccagaagaggcaaatat

SEQ ID NO: 8840 - DNA, 18 bp, synthetic construct
  source 1..18: mol_type = other DNA; mol_type = other DNA
ccccagaagaggcaagta

SEQ ID NO: 8841 - DNA, 18 bp, synthetic construct
  source 1..18: mol_type = other DNA; mol_type = other DNA
ccccagaagaggcaaata

SEQ ID NO: 8842 - DNA, 18 bp, synthetic construct
  source 1..18: mol_type = other DNA; mol_type = other DNA
cccccagaagaggcaagt

SEQ ID NO: 8843 - DNA, 18 bp, synthetic construct
  source 1..18: mol_type = other DNA; mol_type = other DNA
cccccagaagaggcaaat

SEQ ID NO: 8844 - DNA, 18 bp, synthetic construct
  source 1..18: mol_type = other DNA; mol_type = other DNA
acccccagaagaggcaag

SEQ ID NO: 8845 - DNA, 18 bp, synthetic construct
  source 1..18: mol_type = other DNA; mol_type = other DNA
acccccagaagaggcaaa

SEQ ID NO: 8846 - DNA, 18 bp, synthetic construct
  source 1..18: mol_type = other DNA; mol_type = other DNA
cacccccagaagaggcaa

SEQ ID NO: 8847 - DNA, 18 bp, synthetic construct
  source 1..18: mol_type = other DNA; mol_type = other DNA
cacccccagaagagacaa

SEQ ID NO: 8848 - DNA, 18 bp, synthetic construct
  source 1..18: mol_type = other DNA; mol_type = other DNA
acacccccagaagaggca

SEQ ID NO: 8849 - DNA, 18 bp, synthetic construct
  source 1..18: mol_type = other DNA; mol_type = other DNA
acacccccagaagagaca

SEQ ID NO: 8850 - DNA, 18 bp, synthetic construct
  source 1..18: mol_type = other DNA; mol_type = other DNA
tacacccccagaagaggc

SEQ ID NO: 8851 - DNA, 18 bp, synthetic construct
  source 1..18: mol_type = other DNA; mol_type = other DNA
tacacccccagaagagac

SEQ ID NO: 8852 - DNA, 18 bp, synthetic construct
  source 1..18: mol_type = other DNA; mol_type = other DNA
atacacccccagaagagg

SEQ ID NO: 8853 - DNA, 18 bp, synthetic construct
  source 1..18: mol_type = other DNA; mol_type = other DNA
atacacccccagaagaga

SEQ ID NO: 8854 - DNA, 18 bp, synthetic construct
  source 1..18: mol_type = other DNA; mol_type = other DNA
catacacccccagaagag

SEQ ID NO: 8855 - DNA, 18 bp, synthetic construct
  source 1..18: mol_type = other DNA; mol_type = other DNA
catacacccccagaagaa

SEQ ID NO: 8856 - DNA, 18 bp, synthetic construct
  source 1..18: mol_type = other DNA; mol_type = other DNA
acatacacccccagaaga

SEQ ID NO: 8857 - DNA, 18 bp, synthetic construct
  source 1..18: mol_type = other DNA; mol_type = other DNA
acatacacccccagaaaa

SEQ ID NO: 8858 - DNA, 18 bp, synthetic construct
  source 1..18: mol_type = other DNA; mol_type = other DNA
cacatacacccccagaag

SEQ ID NO: 8859 - DNA, 18 bp, synthetic construct
  source 1..18: mol_type = other DNA
cacatacacccccagaaa

SEQ ID NO: 8860 - DNA, 18 bp, synthetic construct
  source 1..18: mol_type = other DNA
acacatacacccccagaa

SEQ ID NO: 8861 - DNA, 18 bp, synthetic construct
  source 1..18: mol_type = other DNA
acacatacacccccaaaa

SEQ ID NO: 8862 - DNA, 18 bp, synthetic construct
  source 1..18: mol_type = other DNA
cacacatacacccccaga

SEQ ID NO: 8863 - DNA, 18 bp, synthetic construct
  source 1..18: mol_type = other DNA
cacacatacacccccaaa

SEQ ID NO: 8864 - DNA, 18 bp, synthetic construct
  source 1..18: mol_type = other DNA
acacacatacacccccag

SEQ ID NO: 8865 - DNA, 18 bp, synthetic construct
  source 1..18: mol_type = other DNA
acacacatacacccccaa

SEQ ID NO: 8866 - DNA, 18 bp, synthetic construct
  source 1..18: mol_type = other DNA
cacacacatacaccccca

SEQ ID NO: 8867 - DNA, 18 bp, synthetic construct
  source 1..18: mol_type = other DNA
acacacacatacaccccc

SEQ ID NO: 8868 - DNA, 18 bp, synthetic construct
  source 1..18: mol_type = other DNA
cacacacacatacacccc

SEQ ID NO: 8869 - DNA, 18 bp, synthetic construct
  source 1..18: mol_type = other DNA
ccacacacacatacaccc

SEQ ID NO: 8870 - DNA, 18 bp, synthetic construct
  source 1..18: mol_type = other DNA
cccacacacacatacacc

SEQ ID NO: 8871 - DNA, 18 bp, synthetic construct
  source 1..18: mol_type = other DNA
gcccacacacacatacac

SEQ ID NO: 8872 - DNA, 18 bp, synthetic construct
  source 1..18: mol_type = other DNA
acccacacacacatacac

SEQ ID NO: 8873 - DNA, 18 bp, synthetic construct
  source 1..18: mol_type = other DNA
tgcccacacacacataca

SEQ ID NO: 8874 - DNA, 18 bp, synthetic construct
  source 1..18: mol_type = other DNA
tacccacacacacataca

SEQ ID NO: 8875 - DNA, 18 bp, synthetic construct
  source 1..18: mol_type = other DNA
gtgcccacacacacatac

SEQ ID NO: 8876 - DNA, 18 bp, synthetic construct
  source 1..18: mol_type = other DNA
gtacccacacacacatac

SEQ ID NO: 8877 - DNA, 18 bp, synthetic construct
  source 1..18: mol_type = other DNA
tgtgcccacacacacata

SEQ ID NO: 8878 - DNA, 18 bp, synthetic construct
  source 1..18: mol_type = other DNA
tgtacccacacacacata

SEQ ID NO: 8879 - DNA, 18 bp, synthetic construct
  source 1..18: mol_type = other DNA
gtgtgcccacacacacat

SEQ ID NO: 8880 - DNA, 18 bp, synthetic construct
  source 1..18: mol_type = other DNA; mol_type = other DNA
gtgtacccacacacacat

SEQ ID NO: 8881 - DNA, 18 bp, synthetic construct
  source 1..18: mol_type = other DNA; mol_type = other DNA
tgtgtgcccacacacaca

SEQ ID NO: 8882 - DNA, 18 bp, synthetic construct
  source 1..18: mol_type = other DNA; mol_type = other DNA
tgtgtacccacacacaca

SEQ ID NO: 8883 - DNA, 18 bp, synthetic construct
  source 1..18: mol_type = other DNA; mol_type = other DNA
ctgtgtgcccacacacac

SEQ ID NO: 8884 - DNA, 18 bp, synthetic construct
  source 1..18: mol_type = other DNA; mol_type = other DNA
ctgtgtacccacacacac

SEQ ID NO: 8885 - DNA, 18 bp, synthetic construct
  source 1..18: mol_type = other DNA; mol_type = other DNA
cctgtgtgcccacacaca

SEQ ID NO: 8886 - DNA, 18 bp, synthetic construct
  source 1..18: mol_type = other DNA; mol_type = other DNA
cctgtgtacccacacaca

SEQ ID NO: 8887 - DNA, 18 bp, synthetic construct
  source 1..18: mol_type = other DNA; mol_type = other DNA
acctgtgtgcccacacac

SEQ ID NO: 8888 - DNA, 18 bp, synthetic construct
  source 1..18: mol_type = other DNA; mol_type = other DNA
acctgtgtacccacacac

SEQ ID NO: 8889 - DNA, 18 bp, synthetic construct
  source 1..18: mol_type = other DNA; mol_type = other DNA
cacctgtgtgcccacaca

SEQ ID NO: 8890 - DNA, 18 bp, synthetic construct
  source 1..18: mol_type = other DNA; mol_type = other DNA
cacctgtgtacccacaca

SEQ ID NO: 8891 - DNA, 18 bp, synthetic construct
  source 1..18: mol_type = other DNA; mol_type = other DNA
tcacctgtgtgcccacac

SEQ ID NO: 8892 - DNA, 18 bp, synthetic construct
  source 1..18: mol_type = other DNA; mol_type = other DNA
tcacctgtgtacccacac

SEQ ID NO: 8893 - DNA, 18 bp, synthetic construct
  source 1..18: mol_type = other DNA; mol_type = other DNA
gtcacctgtgtgcccaca

SEQ ID NO: 8894 - DNA, 18 bp, synthetic construct
  source 1..18: mol_type = other DNA; mol_type = other DNA
gtcacctgtgtacccaca

SEQ ID NO: 8895 - DNA, 18 bp, synthetic construct
  source 1..18: mol_type = other DNA; mol_type = other DNA
ggtcacctgtgtgcccac

SEQ ID NO: 8896 - DNA, 18 bp, synthetic construct
  source 1..18: mol_type = other DNA; mol_type = other DNA
ggtcacctgtgtacccac

SEQ ID NO: 8897 - DNA, 18 bp, synthetic construct
  source 1..18: mol_type = other DNA; mol_type = other DNA
gggtcacctgtgtgccca

SEQ ID NO: 8898 - DNA, 18 bp, synthetic construct
  source 1..18: mol_type = other DNA; mol_type = other DNA
gggtcacctgtgtaccca

SEQ ID NO: 8899 - DNA, 18 bp, synthetic construct
  source 1..18: mol_type = other DNA; mol_type = other DNA
agggtcacctgtgtgccc

SEQ ID NO: 8900 - DNA, 18 bp, synthetic construct
  source 1..18: mol_type = other DNA; mol_type = other DNA
agggtcacctgtgtaccc

SEQ ID NO: 8901 - DNA, 18 bp, synthetic construct
  source 1..18: mol_type = other DNA; mol_type = other DNA
cagggtcacctgtgtgcc

SEQ ID NO: 8902 - DNA, 18 bp, synthetic construct
  source 1..18: mol_type = other DNA; mol_type = other DNA
cagggtcacctgtgtacc

SEQ ID NO: 8903 - DNA, 18 bp, synthetic construct
  source 1..18: mol_type = other DNA; mol_type = other DNA
acagggtcacctgtgtgc

SEQ ID NO: 8904 - DNA, 18 bp, synthetic construct
  source 1..18: mol_type = other DNA; mol_type = other DNA
acagggtcacctgtgtac

SEQ ID NO: 8905 - DNA, 18 bp, synthetic construct
  source 1..18: mol_type = other DNA; mol_type = other DNA
tacagggtcacctgtgtg

SEQ ID NO: 8906 - DNA, 18 bp, synthetic construct
  source 1..18: mol_type = other DNA; mol_type = other DNA
tacagggtcacctgtgta

SEQ ID NO: 8907 - DNA, 18 bp, synthetic construct
  source 1..18: mol_type = other DNA; mol_type = other DNA
gtacagggtcacctgtgt

SEQ ID NO: 8908 - DNA, 18 bp, synthetic construct
  source 1..18: mol_type = other DNA; mol_type = other DNA
gtacagggtcacctgtat

SEQ ID NO: 8909 - DNA, 18 bp, synthetic construct
  source 1..18: mol_type = other DNA; mol_type = other DNA
cacatggcgtgcgcaggg

SEQ ID NO: 8910 - DNA, 18 bp, synthetic construct
  source 1..18: mol_type = other DNA; mol_type = other DNA
cacatggcgtgcgcagga

SEQ ID NO: 8911 - DNA, 18 bp, synthetic construct
  source 1..18: mol_type = other DNA; mol_type = other DNA
acacatggcgtgcgcagg

SEQ ID NO: 8912 - DNA, 18 bp, synthetic construct
  source 1..18: mol_type = other DNA; mol_type = other DNA
acacatggcgtgcgcaga

SEQ ID NO: 8913 - DNA, 18 bp, synthetic construct
  source 1..18: mol_type = other DNA; mol_type = other DNA
cacacatggcgtgcgcag

SEQ ID NO: 8914 - DNA, 18 bp, synthetic construct
  source 1..18: mol_type = other DNA; mol_type = other DNA
cacacatggcgtgcgcaa

SEQ ID NO: 8915 - DNA, 18 bp, synthetic construct
  source 1..18: mol_type = other DNA; mol_type = other DNA
gcacacatggcgtgcgca

SEQ ID NO: 8916 - DNA, 18 bp, synthetic construct
  source 1..18: mol_type = other DNA; mol_type = other DNA
gcacacatggcgtgcaca

SEQ ID NO: 8917 - DNA, 18 bp, synthetic construct
  source 1..18: mol_type = other DNA; mol_type = other DNA
tgcacacatggcgtgcgc

SEQ ID NO: 8918 - DNA, 18 bp, synthetic construct
  source 1..18: mol_type = other DNA; mol_type = other DNA
tgcacacatggcgtgcac

SEQ ID NO: 8919 - DNA, 18 bp, synthetic construct
  source 1..18: mol_type = other DNA; mol_type = other DNA
atgcacacatggcgtgcg

SEQ ID NO: 8920 - DNA, 18 bp, synthetic construct
  source 1..18: mol_type = other DNA; mol_type = other DNA
atgcacacatggcgtgca

SEQ ID NO: 8921 - DNA, 18 bp, synthetic construct
  source 1..18: mol_type = other DNA; mol_type = other DNA
aatgcacacatggcgtgc

SEQ ID NO: 8922 - DNA, 18 bp, synthetic construct
  source 1..18: mol_type = other DNA; mol_type = other DNA
aatgcacacatggcgtac

SEQ ID NO: 8923 - DNA, 18 bp, synthetic construct
  source 1..18: mol_type = other DNA; mol_type = other DNA
gaatgcacacatggcgtg

SEQ ID NO: 8924 - DNA, 18 bp, synthetic construct
  source 1..18: mol_type = other DNA; mol_type = other DNA
gaatgcacacatggcgta

SEQ ID NO: 8925 - DNA, 18 bp, synthetic construct
  source 1..18: mol_type = other DNA; mol_type = other DNA
ggaatgcacacatggcgt

SEQ ID NO: 8926 - DNA, 18 bp, synthetic construct
  source 1..18: mol_type = other DNA; mol_type = other DNA
ggaatgcacacatggcat

SEQ ID NO: 8927 - DNA, 18 bp, synthetic construct
  source 1..18: mol_type = other DNA; mol_type = other DNA
aggaatgcacacatggcg

SEQ ID NO: 8928 - DNA, 18 bp, synthetic construct
  source 1..18: mol_type = other DNA; mol_type = other DNA
aggaatgcacacatggca

SEQ ID NO: 8929 - DNA, 18 bp, synthetic construct
  source 1..18: mol_type = other DNA; mol_type = other DNA
caggaatgcacacatggc

SEQ ID NO: 8930 - DNA, 18 bp, synthetic construct
  source 1..18: mol_type = other DNA; mol_type = other DNA
caggaatgcacacatgac

SEQ ID NO: 8931 - DNA, 18 bp, synthetic construct
  source 1..18: mol_type = other DNA; mol_type = other DNA
acaggaatgcacacatgg

SEQ ID NO: 8932 - DNA, 18 bp, synthetic construct
  source 1..18: mol_type = other DNA; mol_type = other DNA
acaggaatgcacacatga

SEQ ID NO: 8933 - DNA, 18 bp, synthetic construct
  source 1..18: mol_type = other DNA; mol_type = other DNA
cacaggaatgcacacatg

SEQ ID NO: 8934 - DNA, 18 bp, synthetic construct
  source 1..18: mol_type = other DNA; mol_type = other DNA
cacaggaatgcacacata

SEQ ID NO: 8935 - DNA, 18 bp, synthetic construct
  source 1..18: mol_type = other DNA; mol_type = other DNA
acacaggaatgcacacat

SEQ ID NO: 8936 - DNA, 18 bp, synthetic construct
  source 1..18: mol_type = other DNA; mol_type = other DNA
acacaggaatacacacat

SEQ ID NO: 8937 - DNA, 18 bp, synthetic construct
  source 1..18: mol_type = other DNA; mol_type = other DNA
cacacaggaatgcacaca

SEQ ID NO: 8938 - DNA, 18 bp, synthetic construct
  source 1..18: mol_type = other DNA; mol_type = other DNA
cacacaggaatacacaca

SEQ ID NO: 8939 - DNA, 18 bp, synthetic construct
  source 1..18: mol_type = other DNA; mol_type = other DNA
gcacacaggaatgcacac

SEQ ID NO: 8940 - DNA, 18 bp, synthetic construct
  source 1..18: mol_type = other DNA; mol_type = other DNA
gcacacaggaatacacac

SEQ ID NO: 8941 - DNA, 18 bp, synthetic construct
  source 1..18: mol_type = other DNA; mol_type = other DNA
cgcacacaggaatgcaca

SEQ ID NO: 8942 - DNA, 18 bp, synthetic construct
  source 1..18: mol_type = other DNA; mol_type = other DNA
cgcacacaggaatacaca

SEQ ID NO: 8943 - DNA, 18 bp, synthetic construct
  source 1..18: mol_type = other DNA; mol_type = other DNA
gcgcacacaggaatgcac

SEQ ID NO: 8944 - DNA, 18 bp, synthetic construct
  source 1..18: mol_type = other DNA; mol_type = other DNA
gcgcacacaggaatacac

SEQ ID NO: 8945 - DNA, 18 bp, synthetic construct
  source 1..18: mol_type = other DNA; mol_type = other DNA
tgcgcacacaggaatgca

SEQ ID NO: 8946 - DNA, 18 bp, synthetic construct
  source 1..18: mol_type = other DNA; mol_type = other DNA
tgcgcacacaggaataca

SEQ ID NO: 8947 - DNA, 18 bp, synthetic construct
  source 1..18: mol_type = other DNA; mol_type = other DNA
atgcgcacacaggaatgc

SEQ ID NO: 8948 - DNA, 18 bp, synthetic construct
  source 1..18: mol_type = other DNA; mol_type = other DNA
atgcgcacacaggaatac

SEQ ID NO: 8949 - DNA, 18 bp, synthetic construct
  source 1..18: mol_type = other DNA; mol_type = other DNA
catgcgcacacaggaatg

SEQ ID NO: 8950 - DNA, 18 bp, synthetic construct
  source 1..18: mol_type = other DNA; mol_type = other DNA
catgcgcacacaggaata

SEQ ID NO: 8951 - DNA, 18 bp, synthetic construct
  source 1..18: mol_type = other DNA; mol_type = other DNA
acatgcgcacacaggaat

SEQ ID NO: 8952 - DNA, 18 bp, synthetic construct
  source 1..18: mol_type = other DNA; mol_type = other DNA
acatgcgcacacagaaat

SEQ ID NO: 8953 - DNA, 18 bp, synthetic construct
  source 1..18: mol_type = other DNA; mol_type = other DNA
cacatgcgcacacaggaa

SEQ ID NO: 8954 - DNA, 18 bp, synthetic construct
  source 1..18: mol_type = other DNA; mol_type = other DNA
cacatgcgcacacagaaa

SEQ ID NO: 8955 - DNA, 18 bp, synthetic construct
  source 1..18: mol_type = other DNA; mol_type = other DNA
gcacatgcgcacacagga

SEQ ID NO: 8956 - DNA, 18 bp, synthetic construct
  source 1..18: mol_type = other DNA; mol_type = other DNA
gcacatgcgcacacagaa

SEQ ID NO: 8957 - DNA, 18 bp, synthetic construct
  source 1..18: mol_type = other DNA; mol_type = other DNA
agcacatgcgcacacagg

SEQ ID NO: 8958 - DNA, 18 bp, synthetic construct
  source 1..18: mol_type = other DNA; mol_type = other DNA
agcacatgcgcacacaga

SEQ ID NO: 8959 - DNA, 18 bp, synthetic construct
  source 1..18: mol_type = other DNA; mol_type = other DNA
cagcacatgcgcacacag

SEQ ID NO: 8960 - DNA, 18 bp, synthetic construct
  source 1..18: mol_type = other DNA; mol_type = other DNA
cagcacatgcgcacacaa

SEQ ID NO: 8961 - DNA, 18 bp, synthetic construct
  source 1..18: mol_type = other DNA; mol_type = other DNA
acagcacatgcgcacaca

SEQ ID NO: 8962 - DNA, 18 bp, synthetic construct
  source 1..18: mol_type = other DNA; mol_type = other DNA
acagcacatgcacacaca

SEQ ID NO: 8963 - DNA, 18 bp, synthetic construct
  source 1..18: mol_type = other DNA; mol_type = other DNA
aacagcacatgcgcacac

SEQ ID NO: 8964 - DNA, 18 bp, synthetic construct
  source 1..18: mol_type = other DNA; mol_type = other DNA
aacagcacatgcacacac

SEQ ID NO: 8965 - DNA, 18 bp, synthetic construct
  source 1..18: mol_type = other DNA; mol_type = other DNA
caacagcacatgcgcaca

SEQ ID NO: 8966 - DNA, 18 bp, synthetic construct
  source 1..18: mol_type = other DNA; mol_type = other DNA
caacagcacatgcacaca

SEQ ID NO: 8967 - DNA, 18 bp, synthetic construct
  source 1..18: mol_type = other DNA; mol_type = other DNA
acaacagcacatgcgcac

SEQ ID NO: 8968 - DNA, 18 bp, synthetic construct
  source 1..18: mol_type = other DNA; mol_type = other DNA
acaacagcacatgcacac

SEQ ID NO: 8969 - DNA, 18 bp, synthetic construct
  source 1..18: mol_type = other DNA; mol_type = other DNA
cacaacagcacatgcgca

SEQ ID NO: 8970 - DNA, 18 bp, synthetic construct
  source 1..18: mol_type = other DNA; mol_type = other DNA
cacaacagcacatgcaca

SEQ ID NO: 8971 - DNA, 18 bp, synthetic construct
  source 1..18: mol_type = other DNA; mol_type = other DNA
gcacaacagcacatgcgc

SEQ ID NO: 8972 - DNA, 18 bp, synthetic construct
  source 1..18: mol_type = other DNA; mol_type = other DNA
gcacaacagcacatgcac

SEQ ID NO: 8973 - DNA, 18 bp, synthetic construct
  source 1..18: mol_type = other DNA; mol_type = other DNA
agcacaacagcacatgcg

SEQ ID NO: 8974 - DNA, 18 bp, synthetic construct
  source 1..18: mol_type = other DNA; mol_type = other DNA
agcacaacagcacatgca

SEQ ID NO: 8975 - DNA, 18 bp, synthetic construct
  source 1..18: mol_type = other DNA; mol_type = other DNA
gagcacaacagcacatgc

SEQ ID NO: 8976 - DNA, 18 bp, synthetic construct
  source 1..18: mol_type = other DNA; mol_type = other DNA
gagcacaacagcacatac

SEQ ID NO: 8977 - DNA, 18 bp, synthetic construct
  source 1..18: mol_type = other DNA; mol_type = other DNA
cgagcacaacagcacatg

SEQ ID NO: 8978 - DNA, 18 bp, synthetic construct
  source 1..18: mol_type = other DNA; mol_type = other DNA
cgagcacaacagcacata

SEQ ID NO: 8979 - DNA, 18 bp, synthetic construct
  source 1..18: mol_type = other DNA; mol_type = other DNA
ccgagcacaacagcacat

SEQ ID NO: 8980 - DNA, 18 bp, synthetic construct
  source 1..18: mol_type = other DNA; mol_type = other DNA
ccgagcacaacaacacat

SEQ ID NO: 8981 - DNA, 18 bp, synthetic construct
  source 1..18: mol_type = other DNA; mol_type = other DNA
tccgagcacaacagcaca

SEQ ID NO: 8982 - DNA, 18 bp, synthetic construct
  source 1..18: mol_type = other DNA; mol_type = other DNA
tccgagcacaacaacaca

SEQ ID NO: 8983 - DNA, 18 bp, synthetic construct
  source 1..18: mol_type = other DNA; mol_type = other DNA
atccgagcacaacagcac

SEQ ID NO: 8984 - DNA, 18 bp, synthetic construct
  source 1..18: mol_type = other DNA; mol_type = other DNA
atccgagcacaacaacac

SEQ ID NO: 8985 - DNA, 18 bp, synthetic construct
  source 1..18: mol_type = other DNA; mol_type = other DNA
catccgagcacaacagca

SEQ ID NO: 8986 - DNA, 18 bp, synthetic construct
  source 1..18: mol_type = other DNA; mol_type = other DNA
catccgagcacaacaaca

SEQ ID NO: 8987 - DNA, 18 bp, synthetic construct
  source 1..18: mol_type = other DNA; mol_type = other DNA
ccatccgagcacaacagc

SEQ ID NO: 8988 - DNA, 18 bp, synthetic construct
  source 1..18: mol_type = other DNA; mol_type = other DNA
ccatccgagcacaacaac

SEQ ID NO: 8989 - DNA, 18 bp, synthetic construct
  source 1..18: mol_type = other DNA; mol_type = other DNA
accatccgagcacaacag

SEQ ID NO: 8990 - DNA, 18 bp, synthetic construct
  source 1..18: mol_type = other DNA; mol_type = other DNA
accatccgagcacaacaa

SEQ ID NO: 8991 - DNA, 18 bp, synthetic construct
  source 1..18: mol_type = other DNA; mol_type = other DNA
gaccatccgagcacaaca

SEQ ID NO: 8992 - DNA, 18 bp, synthetic construct
  source 1..18: mol_type = other DNA; mol_type = other DNA
gaccatccgaacacaaca

SEQ ID NO: 8993 - DNA, 18 bp, synthetic construct
  source 1..18: mol_type = other DNA; mol_type = other DNA
agaccatccgagcacaac

SEQ ID NO: 8994 - DNA, 18 bp, synthetic construct
  source 1..18: mol_type = other DNA; mol_type = other DNA
agaccatccgaacacaac

SEQ ID NO: 8995 - DNA, 18 bp, synthetic construct
  source 1..18: mol_type = other DNA; mol_type = other DNA
gagaccatccgagcacaa

SEQ ID NO: 8996 - DNA, 18 bp, synthetic construct
  source 1..18: mol_type = other DNA; mol_type = other DNA
gagaccatccgaacacaa

SEQ ID NO: 8997 - DNA, 18 bp, synthetic construct
  source 1..18: mol_type = other DNA; mol_type = other DNA
agagaccatccgagcaca

SEQ ID NO: 8998 - DNA, 18 bp, synthetic construct
  source 1..18: mol_type = other DNA; mol_type = other DNA
agagaccatccgaacaca

SEQ ID NO: 8999 - DNA, 18 bp, synthetic construct
  source 1..18: mol_type = other DNA; mol_type = other DNA
gagagaccatccgagcac

SEQ ID NO: 9000 - DNA, 18 bp, synthetic construct
  source 1..18: mol_type = other DNA; mol_type = other DNA
gagagaccatccgaacac

SEQ ID NO: 9001 - DNA, 18 bp, synthetic construct
  source 1..18: mol_type = other DNA; mol_type = other DNA
ggagagaccatccgagca

SEQ ID NO: 9002 - DNA, 18 bp, synthetic construct
  source 1..18: mol_type = other DNA; mol_type = other DNA
ggagagaccatccgaaca

SEQ ID NO: 9003 - DNA, 18 bp, synthetic construct
  source 1..18: mol_type = other DNA; mol_type = other DNA
tggagagaccatccgagc

SEQ ID NO: 9004 - DNA, 18 bp, synthetic construct
  source 1..18: mol_type = other DNA; mol_type = other DNA
tggagagaccatccgaac

SEQ ID NO: 9005 - DNA, 18 bp, synthetic construct
  source 1..18: mol_type = other DNA; mol_type = other DNA
ctggagagaccatccgag

SEQ ID NO: 9006 - DNA, 18 bp, synthetic construct
  source 1..18: mol_type = other DNA; mol_type = other DNA
ctggagagaccatccgaa

SEQ ID NO: 9007 - DNA, 18 bp, synthetic construct
  source 1..18: mol_type = other DNA; mol_type = other DNA
gctggagagaccatccga

SEQ ID NO: 9008 - DNA, 18 bp, synthetic construct
  source 1..18: mol_type = other DNA; mol_type = other DNA
gctggagagaccatccaa

SEQ ID NO: 9009 - DNA, 18 bp, synthetic construct
  source 1..18: mol_type = other DNA; mol_type = other DNA
ggctggagagaccatccg

SEQ ID NO: 9010 - DNA, 18 bp, synthetic construct
  source 1..18: mol_type = other DNA; mol_type = other DNA
ggctggagagaccatcca

SEQ ID NO: 9011 - DNA, 18 bp, synthetic construct
  source 1..18: mol_type = other DNA; mol_type = other DNA
tggctggagagaccatcc

SEQ ID NO: 9012 - DNA, 18 bp, synthetic construct
  source 1..18: mol_type = other DNA; mol_type = other DNA
tggctggagaaaccatcc

SEQ ID NO: 9013 - DNA, 18 bp, synthetic construct
  source 1..18: mol_type = other DNA; mol_type = other DNA
gtggctggagagaccatc

SEQ ID NO: 9014 - DNA, 18 bp, synthetic construct
  source 1..18: mol_type = other DNA; mol_type = other DNA
gtggctggagaaaccatc

SEQ ID NO: 9015 - DNA, 18 bp, synthetic construct
  source 1..18: mol_type = other DNA; mol_type = other DNA
ggtggctggagagaccat

SEQ ID NO: 9016 - DNA, 18 bp, synthetic construct
  source 1..18: mol_type = other DNA; mol_type = other DNA
ggtggctggagaaaccat

SEQ ID NO: 9017 - DNA, 18 bp, synthetic construct
  source 1..18: mol_type = other DNA; mol_type = other DNA
gggtggctggagagacca

SEQ ID NO: 9018 - DNA, 18 bp, synthetic construct
  source 1..18: mol_type = other DNA; mol_type = other DNA
gggtggctggagaaacca

SEQ ID NO: 9019 - DNA, 18 bp, synthetic construct
  source 1..18: mol_type = other DNA; mol_type = other DNA
tgggtggctggagagacc

SEQ ID NO: 9020 - DNA, 18 bp, synthetic construct
  source 1..18: mol_type = other DNA; mol_type = other DNA
tgggtggctggagaaacc

SEQ ID NO: 9021 - DNA, 18 bp, synthetic construct
  source 1..18: mol_type = other DNA; mol_type = other DNA
ctgggtggctggagagac

SEQ ID NO: 9022 - DNA, 18 bp, synthetic construct
  source 1..18: mol_type = other DNA; mol_type = other DNA
ctgggtggctggagaaac

SEQ ID NO: 9023 - DNA, 18 bp, synthetic construct
  source 1..18: mol_type = other DNA; mol_type = other DNA
gctgggtggctggagaga

SEQ ID NO: 9024 - DNA, 18 bp, synthetic construct
  source 1..18: mol_type = other DNA; mol_type = other DNA
gctgggtggctggagaaa

SEQ ID NO: 9025 - DNA, 18 bp, synthetic construct
  source 1..18: mol_type = other DNA; mol_type = other DNA
agctgggtggctggagag

SEQ ID NO: 9026 - DNA, 18 bp, synthetic construct
  source 1..18: mol_type = other DNA; mol_type = other DNA
agctgggtggctggagaa

SEQ ID NO: 9027 - DNA, 18 bp, synthetic construct
  source 1..18: mol_type = other DNA; mol_type = other DNA
cagctgggtggctggaga

SEQ ID NO: 9028 - DNA, 18 bp, synthetic construct
  source 1..18: mol_type = other DNA; mol_type = other DNA
cagctgggtggctggaaa

SEQ ID NO: 9029 - DNA, 18 bp, synthetic construct
  source 1..18: mol_type = other DNA; mol_type = other DNA
acagctgggtggctggag

SEQ ID NO: 9030 - DNA, 18 bp, synthetic construct
  source 1..18: mol_type = other DNA
acagctgggtggctggaa

SEQ ID NO: 9031 - DNA, 18 bp, synthetic construct
  source 1..18: mol_type = other DNA; mol_type = other DNA
cacagctgggtggctgga

SEQ ID NO: 9032 - DNA, 18 bp, synthetic construct
  source 1..18: mol_type = other DNA; mol_type = other DNA
cacagctgggtggctgaa

SEQ ID NO: 9033 - DNA, 18 bp, synthetic construct
  source 1..18: mol_type = other DNA; mol_type = other DNA
tcacagctgggtggctgg

SEQ ID NO: 9034 - DNA, 18 bp, synthetic construct
  source 1..18: mol_type = other DNA; mol_type = other DNA
tcacagctgggtggctga

SEQ ID NO: 9035 - DNA, 18 bp, synthetic construct
  source 1..18: mol_type = other DNA; mol_type = other DNA
atcacagctgggtggctg

SEQ ID NO: 9036 - DNA, 18 bp, synthetic construct
  source 1..18: mol_type = other DNA; mol_type = other DNA
atcacagctgggtggcta

SEQ ID NO: 9037 - DNA, 18 bp, synthetic construct
  source 1..18: mol_type = other DNA; mol_type = other DNA
aatcacagctgggtggct

SEQ ID NO: 9038 - DNA, 18 bp, synthetic construct
  source 1..18: mol_type = other DNA; mol_type = other DNA
aatcacagctgggtgact

SEQ ID NO: 9039 - DNA, 18 bp, synthetic construct
  source 1..18: mol_type = other DNA; mol_type = other DNA
gaatcacagctgggtggc

SEQ ID NO: 9040 - DNA, 18 bp, synthetic construct
  source 1..18: mol_type = other DNA; mol_type = other DNA
gaatcacagctgggtgac

SEQ ID NO: 9041 - DNA, 18 bp, synthetic construct
  source 1..18: mol_type = other DNA; mol_type = other DNA
ggaatcacagctgggtgg

SEQ ID NO: 9042 - DNA, 18 bp, synthetic construct
  source 1..18: mol_type = other DNA; mol_type = other DNA
ggaatcacagctgggtga

SEQ ID NO: 9043 - DNA, 18 bp, synthetic construct
  source 1..18: mol_type = other DNA; mol_type = other DNA
gggaatcacagctgggtg

SEQ ID NO: 9044 - DNA, 18 bp, synthetic construct
  source 1..18: mol_type = other DNA; mol_type = other DNA
gggaatcacagctgggta

SEQ ID NO: 9045 - DNA, 18 bp, synthetic construct
  source 1..18: mol_type = other DNA; mol_type = other DNA
agggaatcacagctgggt

SEQ ID NO: 9046 - DNA, 18 bp, synthetic construct
  source 1..18: mol_type = other DNA; mol_type = other DNA
agggaatcacagctggat

SEQ ID NO: 9047 - DNA, 18 bp, synthetic construct
  source 1..18: mol_type = other DNA; mol_type = other DNA
gagggaatcacagctggg

SEQ ID NO: 9048 - DNA, 18 bp, synthetic construct
  source 1..18: mol_type = other DNA; mol_type = other DNA
gagggaatcacagctgga

SEQ ID NO: 9049 - DNA, 18 bp, synthetic construct
  source 1..18: mol_type = other DNA; mol_type = other DNA
agagggaatcacagctgg

SEQ ID NO: 9050 - DNA, 18 bp, synthetic construct
  source 1..18: mol_type = other DNA; mol_type = other DNA
agagggaatcacagctga

SEQ ID NO: 9051 - DNA, 18 bp, synthetic construct
  source 1..18: mol_type = other DNA; mol_type = other DNA
aagagggaatcacagctg

SEQ ID NO: 9052 - DNA, 18 bp, synthetic construct
  source 1..18: mol_type = other DNA; mol_type = other DNA
aagagggaatcacagcta

SEQ ID NO: 9053 - DNA, 18 bp, synthetic construct
  source 1..18: mol_type = other DNA; mol_type = other DNA
gaagagggaatcacagct

SEQ ID NO: 9054 - DNA, 18 bp, synthetic construct
  source 1..18: mol_type = other DNA; mol_type = other DNA
gaagagggaatcacaact

SEQ ID NO: 9055 - DNA, 18 bp, synthetic construct
  source 1..18: mol_type = other DNA; mol_type = other DNA
ggaagagggaatcacagc

SEQ ID NO: 9056 - DNA, 18 bp, synthetic construct
  source 1..18: mol_type = other DNA; mol_type = other DNA
ggaagagggaatcacaac

SEQ ID NO: 9057 - DNA, 18 bp, synthetic construct
  source 1..18: mol_type = other DNA; mol_type = other DNA
gggaagagggaatcacag

SEQ ID NO: 9058 - DNA, 18 bp, synthetic construct
  source 1..18: mol_type = other DNA; mol_type = other DNA
gggaagagggaatcacaa

SEQ ID NO: 9059 - DNA, 18 bp, synthetic construct
  source 1..18: mol_type = other DNA; mol_type = other DNA
tgggaagagggaatcaca

SEQ ID NO: 9060 - DNA, 18 bp, synthetic construct
  source 1..18: mol_type = other DNA; mol_type = other DNA
gtggaagagggaatcaca

SEQ ID NO: 9061 - DNA, 18 bp, synthetic construct
  source 1..18: mol_type = other DNA; mol_type = other DNA
ggtgaagagggaatcaca

SEQ ID NO: 9062 - DNA, 18 bp, synthetic construct
  source 1..18: mol_type = other DNA; mol_type = other DNA
gggtaagagggaatcaca

SEQ ID NO: 9063 - DNA, 18 bp, synthetic construct
  source 1..18: mol_type = other DNA; mol_type = other DNA
ctgggaagagggaatcac

SEQ ID NO: 9064 - DNA, 18 bp, synthetic construct
  source 1..18: mol_type = other DNA; mol_type = other DNA
cgtggaagagggaatcac

SEQ ID NO: 9065 - DNA, 18 bp, synthetic construct
  source 1..18: mol_type = other DNA; mol_type = other DNA
cggtgaagagggaatcac

SEQ ID NO: 9066 - DNA, 18 bp, synthetic construct
  source 1..18: mol_type = other DNA; mol_type = other DNA
cgggtaagagggaatcac

SEQ ID NO: 9067 - DNA, 18 bp, synthetic construct
  source 1..18: mol_type = other DNA; mol_type = other DNA
gctgggaagagggaatca

SEQ ID NO: 9068 - DNA, 18 bp, synthetic construct
  source 1..18: mol_type = other DNA; mol_type = other DNA
gcgtggaagagggaatca

SEQ ID NO: 9069 - DNA, 18 bp, synthetic construct
  source 1..18: mol_type = other DNA; mol_type = other DNA
gcggtgaagagggaatca

SEQ ID NO: 9070 - DNA, 18 bp, synthetic construct
  source 1..18: mol_type = other DNA; mol_type = other DNA
gcgggtaagagggaatca

SEQ ID NO: 9071 - DNA, 18 bp, synthetic construct
  source 1..18: mol_type = other DNA; mol_type = other DNA
tgctgggaagagggaatc

SEQ ID NO: 9072 - DNA, 18 bp, synthetic construct
  source 1..18: mol_type = other DNA; mol_type = other DNA
tgcgtggaagagggaatc

SEQ ID NO: 9073 - DNA, 18 bp, synthetic construct
  source 1..18: mol_type = other DNA; mol_type = other DNA
tgcggtgaagagggaatc

SEQ ID NO: 9074 - DNA, 18 bp, synthetic construct
  source 1..18: mol_type = other DNA; mol_type = other DNA
tgcgggtaagagggaatc

SEQ ID NO: 9075 - DNA, 18 bp, synthetic construct
  source 1..18: mol_type = other DNA; mol_type = other DNA
ttgctgggaagagggaat

SEQ ID NO: 9076 - DNA, 18 bp, synthetic construct
  source 1..18: mol_type = other DNA; mol_type = other DNA
ttgcgtggaagagggaat

SEQ ID NO: 9077 - DNA, 18 bp, synthetic construct
  source 1..18: mol_type = other DNA; mol_type = other DNA
ttgcggtgaagagggaat

SEQ ID NO: 9078 - DNA, 18 bp, synthetic construct
  source 1..18: mol_type = other DNA; mol_type = other DNA
ttgcgggtaagagggaat

SEQ ID NO: 9079 - DNA, 18 bp, synthetic construct
  source 1..18: mol_type = other DNA; mol_type = other DNA
gttgctgggaagagggaa

SEQ ID NO: 9080 - DNA, 18 bp, synthetic construct
  source 1..18: mol_type = other DNA; mol_type = other DNA
gttgcgtggaagagggaa

SEQ ID NO: 9081 - DNA, 18 bp, synthetic construct
  source 1..18: mol_type = other DNA; mol_type = other DNA
gttgcggtgaagagggaa

SEQ ID NO: 9082 - DNA, 18 bp, synthetic construct
  source 1..18: mol_type = other DNA; mol_type = other DNA
gttgcgggtaagagggaa

SEQ ID NO: 9083 - DNA, 18 bp, synthetic construct
  source 1..18: mol_type = other DNA; mol_type = other DNA
tgttgctgggaagaggga

SEQ ID NO: 9084 - DNA, 18 bp, synthetic construct
  source 1..18: mol_type = other DNA; mol_type = other DNA
tgttgcgtggaagaggga

SEQ ID NO: 9085 - DNA, 18 bp, synthetic construct
  source 1..18: mol_type = other DNA; mol_type = other DNA
tgttgcggtgaagaggga

SEQ ID NO: 9086 - DNA, 18 bp, synthetic construct
  source 1..18: mol_type = other DNA; mol_type = other DNA
tgttgcgggtaagaggga

SEQ ID NO: 9087 - DNA, 18 bp, synthetic construct
  source 1..18: mol_type = other DNA; mol_type = other DNA
ctgttgcagggaagaggg

SEQ ID NO: 9088 - DNA, 18 bp, synthetic construct
  source 1..18: mol_type = other DNA; mol_type = other DNA
ctgttgcgaggaagaggg

SEQ ID NO: 9089 - DNA, 18 bp, synthetic construct
  source 1..18: mol_type = other DNA; mol_type = other DNA
ctgttgcggagaagaggg

SEQ ID NO: 9090 - DNA, 18 bp, synthetic construct
  source 1..18: mol_type = other DNA; mol_type = other DNA
ctgttgcgggaaagaggg

SEQ ID NO: 9091 - DNA, 18 bp, synthetic construct
  source 1..18: mol_type = other DNA; mol_type = other DNA
cctattgcagggaagagg

SEQ ID NO: 9092 - DNA, 18 bp, synthetic construct
  source 1..18: mol_type = other DNA; mol_type = other DNA
cctattgcgaggaagagg

SEQ ID NO: 9093 - DNA, 18 bp, synthetic construct
  source 1..18: mol_type = other DNA; mol_type = other DNA
cctattgcggagaagagg

SEQ ID NO: 9094 - DNA, 18 bp, synthetic construct
  source 1..18: mol_type = other DNA; mol_type = other DNA
cctattgcgggaaagagg

SEQ ID NO: 9095 - DNA, 18 bp, synthetic construct
  source 1..18: mol_type = other DNA; mol_type = other DNA
tcctgttgcagggaagag

SEQ ID NO: 9096 - DNA, 18 bp, synthetic construct
  source 1..18: mol_type = other DNA; mol_type = other DNA
tcctgttgcgaggaagag

SEQ ID NO: 9097 - DNA, 18 bp, synthetic construct
  source 1..18: mol_type = other DNA; mol_type = other DNA
tcctgttgcggagaagag

SEQ ID NO: 9098 - DNA, 18 bp, synthetic construct
  source 1..18: mol_type = other DNA; mol_type = other DNA
tcctgttgcgggaaagag

SEQ ID NO: 9099 - DNA, 18 bp, synthetic construct
  source 1..18: mol_type = other DNA; mol_type = other DNA
ctcctgttgcagggaaga

SEQ ID NO: 9100 - DNA, 18 bp, synthetic construct
  source 1..18: mol_type = other DNA; mol_type = other DNA
ctcctgttgcgaggaaga

SEQ ID NO: 9101 - DNA, 18 bp, synthetic construct
  source 1..18: mol_type = other DNA; mol_type = other DNA
ctcctgttgcggagaaga

SEQ ID NO: 9102 - DNA, 18 bp, synthetic construct
  source 1..18: mol_type = other DNA; mol_type = other DNA
ctcctgttgcgggaaaga

SEQ ID NO: 9103 - DNA, 18 bp, synthetic construct
  source 1..18: mol_type = other DNA; mol_type = other DNA
tctcctgttgcagggaag

SEQ ID NO: 9104 - DNA, 18 bp, synthetic construct
  source 1..18: mol_type = other DNA; mol_type = other DNA
tctcctgttgcgaggaag

SEQ ID NO: 9105 - DNA, 18 bp, synthetic construct
  source 1..18: mol_type = other DNA; mol_type = other DNA
tctcctgttgcggagaag

SEQ ID NO: 9106 - DNA, 18 bp, synthetic construct
  source 1..18: mol_type = other DNA; mol_type = other DNA
tctcctgttgcgggaaag

SEQ ID NO: 9107 - DNA, 18 bp, synthetic construct
  source 1..18: mol_type = other DNA; mol_type = other DNA
ctctcctgttgcagggaa

SEQ ID NO: 9108 - DNA, 18 bp, synthetic construct
  source 1..18: mol_type = other DNA; mol_type = other DNA
ctctcctgttgcgaggaa

SEQ ID NO: 9109 - DNA, 18 bp, synthetic construct
  source 1..18: mol_type = other DNA; mol_type = other DNA
ctctcctgttgcggagaa

SEQ ID NO: 9110 - DNA, 18 bp, synthetic construct
  source 1..18: mol_type = other DNA; mol_type = other DNA
ctctcctgttgcgggaaa

SEQ ID NO: 9111 - DNA, 18 bp, synthetic construct
  source 1..18: mol_type = other DNA; mol_type = other DNA
gctctcctgttgcaggga

SEQ ID NO: 9112 - DNA, 18 bp, synthetic construct
  source 1..18: mol_type = other DNA; mol_type = other DNA
gctctcctgttgcgagga

SEQ ID NO: 9113 - DNA, 18 bp, synthetic construct
  source 1..18: mol_type = other DNA; mol_type = other DNA
gctctcctgttgcggaga

SEQ ID NO: 9114 - DNA, 18 bp, synthetic construct
  source 1..18: mol_type = other DNA; mol_type = other DNA
gctctcctgttgcgggaa

SEQ ID NO: 9115 - DNA, 18 bp, synthetic construct
  source 1..18: mol_type = other DNA; mol_type = other DNA
agctctcctgttgcaggg

SEQ ID NO: 9116 - DNA, 18 bp, synthetic construct
  source 1..18: mol_type = other DNA; mol_type = other DNA
agctctcctgttgcgagg

SEQ ID NO: 9117 - DNA, 18 bp, synthetic construct
  source 1..18: mol_type = other DNA; mol_type = other DNA
agctctcctgttgcggag

SEQ ID NO: 9118 - DNA, 18 bp, synthetic construct
  source 1..18: mol_type = other DNA; mol_type = other DNA
agctctcctgttgcggga

SEQ ID NO: 9119 - DNA, 18 bp, synthetic construct
  source 1..18: mol_type = other DNA; mol_type = other DNA
cagctctcctgttgcggg

SEQ ID NO: 9120 - DNA, 18 bp, synthetic construct
  source 1..18: mol_type = other DNA; mol_type = other DNA
cagctctcctgttgcgga

SEQ ID NO: 9121 - DNA, 18 bp, synthetic construct
  source 1..18: mol_type = other DNA; mol_type = other DNA
acagctctcctgttgcgg

SEQ ID NO: 9122 - DNA, 18 bp, synthetic construct
  source 1..18: mol_type = other DNA; mol_type = other DNA
acagctctcctgttgcga

SEQ ID NO: 9123 - DNA, 18 bp, synthetic construct
  source 1..18: mol_type = other DNA; mol_type = other DNA
cacagctctcctgttgcg

SEQ ID NO: 9124 - DNA, 18 bp, synthetic construct
  source 1..18: mol_type = other DNA; mol_type = other DNA
cacagctctcctgttgca

SEQ ID NO: 9125 - DNA, 18 bp, synthetic construct
  source 1..18: mol_type = other DNA; mol_type = other DNA
gcacagctctcctgttgc

SEQ ID NO: 9126 - DNA, 18 bp, synthetic construct
  source 1..18: mol_type = other DNA; mol_type = other DNA
gcacagctctcctgttac

SEQ ID NO: 9127 - DNA, 18 bp, synthetic construct
  source 1..18: mol_type = other DNA; mol_type = other DNA
agcacagctctcctgttg

SEQ ID NO: 9128 - DNA, 18 bp, synthetic construct
  source 1..18: mol_type = other DNA; mol_type = other DNA
agcacagctctcctgtta

SEQ ID NO: 9129 - DNA, 18 bp, synthetic construct
  source 1..18: mol_type = other DNA; mol_type = other DNA
gagcacagctctcctgtt

SEQ ID NO: 9130 - DNA, 18 bp, synthetic construct
  source 1..18: mol_type = other DNA; mol_type = other DNA
gagcacagctctcctatt

SEQ ID NO: 9131 - DNA, 18 bp, synthetic construct
  source 1..18: mol_type = other DNA; mol_type = other DNA
cgagcacagctctcctgt

SEQ ID NO: 9132 - DNA, 18 bp, synthetic construct
  source 1..18: mol_type = other DNA; mol_type = other DNA
cgagcacagctctcctat

SEQ ID NO: 9133 - DNA, 18 bp, synthetic construct
  source 1..18: mol_type = other DNA; mol_type = other DNA
acgagcacagctctcctg

SEQ ID NO: 9134 - DNA, 18 bp, synthetic construct
  source 1..18: mol_type = other DNA; mol_type = other DNA
acgagcacagctctccta

SEQ ID NO: 9135 - DNA, 18 bp, synthetic construct
  source 1..18: mol_type = other DNA; mol_type = other DNA
cacgagcacagctctcct

SEQ ID NO: 9136 - DNA, 18 bp, synthetic construct
  source 1..18: mol_type = other DNA; mol_type = other DNA
cacgagcacaactctcct

SEQ ID NO: 9137 - DNA, 18 bp, synthetic construct
  source 1..18: mol_type = other DNA; mol_type = other DNA
acacgagcacagctctcc

SEQ ID NO: 9138 - DNA, 18 bp, synthetic construct
  source 1..18: mol_type = other DNA; mol_type = other DNA
acacgagcacaactctcc

SEQ ID NO: 9139 - DNA, 18 bp, synthetic construct
  source 1..18: mol_type = other DNA; mol_type = other DNA
gacacgagcacagctctc

SEQ ID NO: 9140 - DNA, 18 bp, synthetic construct
  source 1..18: mol_type = other DNA; mol_type = other DNA
gacacgagcacaactctc

SEQ ID NO: 9141 - DNA, 18 bp, synthetic construct
  source 1..18: mol_type = other DNA; mol_type = other DNA
ggacacgagcacagctct

SEQ ID NO: 9142 - DNA, 18 bp, synthetic construct
  source 1..18: mol_type = other DNA; mol_type = other DNA
ggacacgagcacaactct

SEQ ID NO: 9143 - DNA, 18 bp, synthetic construct
  source 1..18: mol_type = other DNA; mol_type = other DNA
aggacacgagcacagctc

SEQ ID NO: 9144 - DNA, 18 bp, synthetic construct
  source 1..18: mol_type = other DNA; mol_type = other DNA
aggacacgagcacaactc

SEQ ID NO: 9145 - DNA, 18 bp, synthetic construct
  source 1..18: mol_type = other DNA; mol_type = other DNA
caggacacgagcacagct

SEQ ID NO: 9146 - DNA, 18 bp, synthetic construct
  source 1..18: mol_type = other DNA; mol_type = other DNA
caggacacgagcacaact

SEQ ID NO: 9147 - DNA, 18 bp, synthetic construct
  source 1..18: mol_type = other DNA; mol_type = other DNA
gcaggacacgagcacagc

SEQ ID NO: 9148 - DNA, 18 bp, synthetic construct
  source 1..18: mol_type = other DNA; mol_type = other DNA
gcaggacacgagcacaac

SEQ ID NO: 9149 - DNA, 18 bp, synthetic construct
  source 1..18: mol_type = other DNA; mol_type = other DNA
agcaggacacgagcacag

SEQ ID NO: 9150 - DNA, 18 bp, synthetic construct
  source 1..18: mol_type = other DNA; mol_type = other DNA
agcaggacacgagcacaa

SEQ ID NO: 9151 - DNA, 18 bp, synthetic construct
  source 1..18: mol_type = other DNA; mol_type = other DNA
gagcaggacacgagcaca

SEQ ID NO: 9152 - DNA, 18 bp, synthetic construct
  source 1..18: mol_type = other DNA; mol_type = other DNA
gagcaggacacgaacaca

SEQ ID NO: 9153 - DNA, 18 bp, synthetic construct
  source 1..18: mol_type = other DNA; mol_type = other DNA
agagcaggacacgagcac

SEQ ID NO: 9154 - DNA, 18 bp, synthetic construct
  source 1..18: mol_type = other DNA; mol_type = other DNA
agagcaggacacgaacac

SEQ ID NO: 9155 - DNA, 18 bp, synthetic construct
  source 1..18: mol_type = other DNA; mol_type = other DNA
aagagcaggacacgagca

SEQ ID NO: 9156 - DNA, 18 bp, synthetic construct
  source 1..18: mol_type = other DNA; mol_type = other DNA
aagagcaggacacgaaca

SEQ ID NO: 9157 - DNA, 18 bp, synthetic construct
  source 1..18: mol_type = other DNA; mol_type = other DNA
gaagagcaggacacgagc

SEQ ID NO: 9158 - DNA, 18 bp, synthetic construct
  source 1..18: mol_type = other DNA; mol_type = other DNA
gaagagcaggacacgaac

SEQ ID NO: 9159 - DNA, 18 bp, synthetic construct
  source 1..18: mol_type = other DNA; mol_type = other DNA
ggaagagcaggacacgag

SEQ ID NO: 9160 - DNA, 18 bp, synthetic construct
  source 1..18: mol_type = other DNA; mol_type = other DNA
ggaagagcaggacacgaa

SEQ ID NO: 9161 - DNA, 18 bp, synthetic construct
  source 1..18: mol_type = other DNA; mol_type = other DNA
cggaagagcaggacacga

SEQ ID NO: 9162 - DNA, 18 bp, synthetic construct
  source 1..18: mol_type = other DNA; mol_type = other DNA
cggaagagcaggacacaa

SEQ ID NO: 9163 - DNA, 18 bp, synthetic construct
  source 1..18: mol_type = other DNA; mol_type = other DNA
acggaagagcaggacacg

SEQ ID NO: 9164 - DNA, 18 bp, synthetic construct
  source 1..18: mol_type = other DNA; mol_type = other DNA
acggaagagcaggacaca

SEQ ID NO: 9165 - DNA, 18 bp, synthetic construct
  source 1..18: mol_type = other DNA; mol_type = other DNA
cacggaagagcaggacac

SEQ ID NO: 9166 - DNA, 18 bp, synthetic construct
  source 1..18: mol_type = other DNA; mol_type = other DNA
cacggaagagcagaacac

SEQ ID NO: 9167 - DNA, 18 bp, synthetic construct
  source 1..18: mol_type = other DNA; mol_type = other DNA
ccacggaagagcaggaca

SEQ ID NO: 9168 - DNA, 18 bp, synthetic construct
  source 1..18: mol_type = other DNA; mol_type = other DNA
ccacggaagagcagaaca

SEQ ID NO: 9169 - DNA, 18 bp, synthetic construct
  source 1..18: mol_type = other DNA; mol_type = other DNA
tccacggaagagcaggac

SEQ ID NO: 9170 - DNA, 18 bp, synthetic construct
  source 1..18: mol_type = other DNA; mol_type = other DNA
tccacggaagagcagaac

SEQ ID NO: 9171 - DNA, 18 bp, synthetic construct
  source 1..18: mol_type = other DNA; mol_type = other DNA
ctccacggaagagcagga

SEQ ID NO: 9172 - DNA, 18 bp, synthetic construct
  source 1..18: mol_type = other DNA; mol_type = other DNA
ctccacggaagagcagaa

SEQ ID NO: 9173 - DNA, 18 bp, synthetic construct
  source 1..18: mol_type = other DNA; mol_type = other DNA
gctccacggaagagcagg

SEQ ID NO: 9174 - DNA, 18 bp, synthetic construct
  source 1..18: mol_type = other DNA; mol_type = other DNA
gctccacggaagagcaga

SEQ ID NO: 9175 - DNA, 18 bp, synthetic construct
  source 1..18: mol_type = other DNA; mol_type = other DNA
agctccacggaagagcag

SEQ ID NO: 9176 - DNA, 18 bp, synthetic construct
  source 1..18: mol_type = other DNA; mol_type = other DNA
agctccacggaagagcaa

SEQ ID NO: 9177 - DNA, 18 bp, synthetic construct
  source 1..18: mol_type = other DNA; mol_type = other DNA
tagctccacggaagagca

SEQ ID NO: 9178 - DNA, 18 bp, synthetic construct
  source 1..18: mol_type = other DNA; mol_type = other DNA
tagctccacggaagaaca

SEQ ID NO: 9179 - DNA, 18 bp, synthetic construct
  source 1..18: mol_type = other DNA; mol_type = other DNA
ttagctccacggaagagc

SEQ ID NO: 9180 - DNA, 18 bp, synthetic construct
  source 1..18: mol_type = other DNA; mol_type = other DNA
ttagctccacggaagaac

SEQ ID NO: 9181 - DNA, 18 bp, synthetic construct
  source 1..18: mol_type = other DNA; mol_type = other DNA
gttagctccacggaagag

SEQ ID NO: 9182 - DNA, 18 bp, synthetic construct
  source 1..18: mol_type = other DNA; mol_type = other DNA
gttagctccacggaagaa

SEQ ID NO: 9183 - DNA, 18 bp, synthetic construct
  source 1..18: mol_type = other DNA; mol_type = other DNA
tgttagctccacggaaga

SEQ ID NO: 9184 - DNA, 18 bp, synthetic construct
  source 1..18: mol_type = other DNA; mol_type = other DNA
tgttagctccacggaaaa

SEQ ID NO: 9185 - DNA, 18 bp, synthetic construct
  source 1..18: mol_type = other DNA; mol_type = other DNA
ctgttagctccacggaag

SEQ ID NO: 9186 - DNA, 18 bp, synthetic construct
  source 1..18: mol_type = other DNA; mol_type = other DNA
ctgttagctccacggaaa

SEQ ID NO: 9187 - DNA, 18 bp, synthetic construct
  source 1..18: mol_type = other DNA; mol_type = other DNA
cctgttagctccacggaa

SEQ ID NO: 9188 - DNA, 18 bp, synthetic construct
  source 1..18: mol_type = other DNA; mol_type = other DNA
cctgttagctccacgaaa

SEQ ID NO: 9189 - DNA, 18 bp, synthetic construct
  source 1..18: mol_type = other DNA; mol_type = other DNA
ccctgttagctccacgga

SEQ ID NO: 9190 - DNA, 18 bp, synthetic construct
  source 1..18: mol_type = other DNA; mol_type = other DNA
ccctgttagctccacgaa

SEQ ID NO: 9191 - DNA, 18 bp, synthetic construct
  source 1..18: mol_type = other DNA; mol_type = other DNA
tccctgttagctccacgg

SEQ ID NO: 9192 - DNA, 18 bp, synthetic construct
  source 1..18: mol_type = other DNA; mol_type = other DNA
tccctgttagctccacga

SEQ ID NO: 9193 - DNA, 18 bp, synthetic construct
  source 1..18: mol_type = other DNA; mol_type = other DNA
atccctgttagctccacg

SEQ ID NO: 9194 - DNA, 18 bp, synthetic construct
  source 1..18: mol_type = other DNA; mol_type = other DNA
atccctgttagctccaca

SEQ ID NO: 9195 - DNA, 18 bp, synthetic construct
  source 1..18: mol_type = other DNA; mol_type = other DNA
catccctgttagctccac

SEQ ID NO: 9196 - DNA, 18 bp, synthetic construct
  source 1..18: mol_type = other DNA; mol_type = other DNA
catccctgttaactccac

SEQ ID NO: 9197 - DNA, 18 bp, synthetic construct
  source 1..18: mol_type = other DNA; mol_type = other DNA
acatccctgttagctcca

SEQ ID NO: 9198 - DNA, 18 bp, synthetic construct
  source 1..18: mol_type = other DNA; mol_type = other DNA
acatccctgttaactcca

SEQ ID NO: 9199 - DNA, 18 bp, synthetic construct
  source 1..18: mol_type = other DNA; mol_type = other DNA
gacatccctgttagctcc

SEQ ID NO: 9200 - DNA, 18 bp, synthetic construct
  source 1..18: mol_type = other DNA; mol_type = other DNA
gacatccctgttaactcc

SEQ ID NO: 9201 - DNA, 18 bp, synthetic construct
  source 1..18: mol_type = other DNA; mol_type = other DNA
ggacatccctgttagctc

SEQ ID NO: 9202 - DNA, 18 bp, synthetic construct
  source 1..18: mol_type = other DNA; mol_type = other DNA
ggacatccctgttaactc

SEQ ID NO: 9203 - DNA, 18 bp, synthetic construct
  source 1..18: mol_type = other DNA; mol_type = other DNA
cggacatccctgttagct

SEQ ID NO: 9204 - DNA, 18 bp, synthetic construct
  source 1..18: mol_type = other DNA; mol_type = other DNA
cggacatccctgttaact

SEQ ID NO: 9205 - DNA, 18 bp, synthetic construct
  source 1..18: mol_type = other DNA; mol_type = other DNA
gcggacatccctgttagc

SEQ ID NO: 9206 - DNA, 18 bp, synthetic construct
  source 1..18: mol_type = other DNA; mol_type = other DNA
gcggacatccctgttaac

SEQ ID NO: 9207 - DNA, 18 bp, synthetic construct
  source 1..18: mol_type = other DNA; mol_type = other DNA
tgcggacatccctgttag

SEQ ID NO: 9208 - DNA, 18 bp, synthetic construct
  source 1..18: mol_type = other DNA; mol_type = other DNA
tgcggacatccctgttaa

SEQ ID NO: 9209 - DNA, 18 bp, synthetic construct
  source 1..18: mol_type = other DNA; mol_type = other DNA
ttgcggacatccctgtta

SEQ ID NO: 9210 - DNA, 18 bp, synthetic construct
  source 1..18: mol_type = other DNA; mol_type = other DNA
ttgcggacatccctatta

SEQ ID NO: 9211 - DNA, 18 bp, synthetic construct
  source 1..18: mol_type = other DNA; mol_type = other DNA
gttgcggacatccctgtt

SEQ ID NO: 9212 - DNA, 18 bp, synthetic construct
  source 1..18: mol_type = other DNA; mol_type = other DNA
gttgcggacatccctatt

SEQ ID NO: 9213 - DNA, 18 bp, synthetic construct
  source 1..18: mol_type = other DNA; mol_type = other DNA
agttgcggacatccctgt

SEQ ID NO: 9214 - DNA, 18 bp, synthetic construct
  source 1..18: mol_type = other DNA; mol_type = other DNA
agttgcggacatccctat

SEQ ID NO: 9215 - DNA, 18 bp, synthetic construct
  source 1..18: mol_type = other DNA; mol_type = other DNA
tagttgcggacatccctg

SEQ ID NO: 9216 - DNA, 18 bp, synthetic construct
  source 1..18: mol_type = other DNA; mol_type = other DNA
tagttgcggacatcccta

SEQ ID NO: 9217 - DNA, 18 bp, synthetic construct
  source 1..18: mol_type = other DNA; mol_type = other DNA
gtagttgcggacatccct

SEQ ID NO: 9218 - DNA, 18 bp, synthetic construct
  source 1..18: mol_type = other DNA; mol_type = other DNA
gtagttgcgaacatccct

SEQ ID NO: 9219 - DNA, 18 bp, synthetic construct
  source 1..18: mol_type = other DNA; mol_type = other DNA
tgtagttgcggacatccc

SEQ ID NO: 9220 - DNA, 18 bp, synthetic construct
  source 1..18: mol_type = other DNA; mol_type = other DNA
tgtagttgcgaacatccc

SEQ ID NO: 9221 - DNA, 18 bp, synthetic construct
  source 1..18: mol_type = other DNA; mol_type = other DNA
ttgtagttgcggacatcc

SEQ ID NO: 9222 - DNA, 18 bp, synthetic construct
  source 1..18: mol_type = other DNA; mol_type = other DNA
ttgtagttgcgaacatcc

SEQ ID NO: 9223 - DNA, 18 bp, synthetic construct
  source 1..18: mol_type = other DNA; mol_type = other DNA
gttgtagttgcggacatc

SEQ ID NO: 9224 - DNA, 18 bp, synthetic construct
  source 1..18: mol_type = other DNA; mol_type = other DNA
gttgtagttgcgaacatc

SEQ ID NO: 9225 - DNA, 18 bp, synthetic construct
  source 1..18: mol_type = other DNA; mol_type = other DNA
tgttgtagttgcggacat

SEQ ID NO: 9226 - DNA, 18 bp, synthetic construct
  source 1..18: mol_type = other DNA; mol_type = other DNA
tgttgtagttgcgaacat

SEQ ID NO: 9227 - DNA, 18 bp, synthetic construct
  source 1..18: mol_type = other DNA; mol_type = other DNA
ctgttgtagttgcggaca

SEQ ID NO: 9228 - DNA, 18 bp, synthetic construct
  source 1..18: mol_type = other DNA; mol_type = other DNA
ctgttgtagttgcgaaca

SEQ ID NO: 9229 - DNA, 18 bp, synthetic construct
  source 1..18: mol_type = other DNA; mol_type = other DNA
gctgttgtagttgcggac

SEQ ID NO: 9230 - DNA, 18 bp, synthetic construct
  source 1..18: mol_type = other DNA; mol_type = other DNA
gctgttgtagttgcgaac

SEQ ID NO: 9231 - DNA, 18 bp, synthetic construct
  source 1..18: mol_type = other DNA; mol_type = other DNA
ggctgttgtagttgcgga

SEQ ID NO: 9232 - DNA, 18 bp, synthetic construct
  source 1..18: mol_type = other DNA; mol_type = other DNA
ggctgttgtagttgcgaa

SEQ ID NO: 9233 - DNA, 18 bp, synthetic construct
  source 1..18: mol_type = other DNA; mol_type = other DNA
tggctgttgtagttgcgg

SEQ ID NO: 9234 - DNA, 18 bp, synthetic construct
  source 1..18: mol_type = other DNA; mol_type = other DNA
tggctgttgtagttgcga

SEQ ID NO: 9235 - DNA, 18 bp, synthetic construct
  source 1..18: mol_type = other DNA; mol_type = other DNA
ctggctgttgtagttgcg

SEQ ID NO: 9236 - DNA, 18 bp, synthetic construct
  source 1..18: mol_type = other DNA; mol_type = other DNA
ctggctgttgtagttgca

SEQ ID NO: 9237 - DNA, 18 bp, synthetic construct
  source 1..18: mol_type = other DNA; mol_type = other DNA
tctggctgttgtagttgc

SEQ ID NO: 9238 - DNA, 18 bp, synthetic construct
  source 1..18: mol_type = other DNA; mol_type = other DNA
tctggctgttgtagttac

SEQ ID NO: 9239 - DNA, 18 bp, synthetic construct
  source 1..18: mol_type = other DNA; mol_type = other DNA
gtctggctgttgtagttg

SEQ ID NO: 9240 - DNA, 18 bp, synthetic construct
  source 1..18: mol_type = other DNA; mol_type = other DNA
gtctggctgttgtagtta

SEQ ID NO: 9241 - DNA, 18 bp, synthetic construct
  source 1..18: mol_type = other DNA; mol_type = other DNA
tgtctggctgttgtagtt

SEQ ID NO: 9242 - DNA, 18 bp, synthetic construct
  source 1..18: mol_type = other DNA; mol_type = other DNA
tgtctggctgttgtaatt

SEQ ID NO: 9243 - DNA, 18 bp, synthetic construct
  source 1..18: mol_type = other DNA; mol_type = other DNA
ctgtctggctgttgtagt

SEQ ID NO: 9244 - DNA, 18 bp, synthetic construct
  source 1..18: mol_type = other DNA; mol_type = other DNA
ctgtctggctgttgtaat

SEQ ID NO: 9245 - DNA, 18 bp, synthetic construct
  source 1..18: mol_type = other DNA; mol_type = other DNA
gctgtctggctgttgtag

SEQ ID NO: 9246 - DNA, 18 bp, synthetic construct
  source 1..18: mol_type = other DNA; mol_type = other DNA
gctgtctggctgttgtaa

SEQ ID NO: 9247 - DNA, 18 bp, synthetic construct
  source 1..18: mol_type = other DNA; mol_type = other DNA
ggctgtctggctgttgta

SEQ ID NO: 9248 - DNA, 18 bp, synthetic construct
  source 1..18: mol_type = other DNA; mol_type = other DNA
ggctgtctggctgttata

SEQ ID NO: 9249 - DNA, 18 bp, synthetic construct
  source 1..18: mol_type = other DNA; mol_type = other DNA
aggctgtctggctgttgt

SEQ ID NO: 9250 - DNA, 18 bp, synthetic construct
  source 1..18: mol_type = other DNA; mol_type = other DNA
aggctgtctggctgttat

SEQ ID NO: 9251 - DNA, 18 bp, synthetic construct
  source 1..18: mol_type = other DNA; mol_type = other DNA
aaggctgtctggctgttg

SEQ ID NO: 9252 - DNA, 18 bp, synthetic construct
  source 1..18: mol_type = other DNA; mol_type = other DNA
aaggctgtctggctgtta

SEQ ID NO: 9253 - DNA, 18 bp, synthetic construct
  source 1..18: mol_type = other DNA; mol_type = other DNA
gaaggctgtctggctgtt

SEQ ID NO: 9254 - DNA, 18 bp, synthetic construct
  source 1..18: mol_type = other DNA; mol_type = other DNA
gaaggctgtctggctatt

SEQ ID NO: 9255 - DNA, 18 bp, synthetic construct
  source 1..18: mol_type = other DNA; mol_type = other DNA
ggaaggctgtctggctgt

SEQ ID NO: 9256 - DNA, 18 bp, synthetic construct
  source 1..18: mol_type = other DNA; mol_type = other DNA
ggaaggctgtctggctat

SEQ ID NO: 9257 - DNA, 18 bp, synthetic construct
  source 1..18: mol_type = other DNA; mol_type = other DNA
tggaaggctgtctggctg

SEQ ID NO: 9258 - DNA, 18 bp, synthetic construct
  source 1..18: mol_type = other DNA; mol_type = other DNA
tggaaggctgtctggcta

SEQ ID NO: 9259 - DNA, 18 bp, synthetic construct
  source 1..18: mol_type = other DNA; mol_type = other DNA
ctggaaggctgtctggct

SEQ ID NO: 9260 - DNA, 18 bp, synthetic construct
  source 1..18: mol_type = other DNA; mol_type = other DNA
ctggaaggctgtctgact

SEQ ID NO: 9261 - DNA, 18 bp, synthetic construct
  source 1..18: mol_type = other DNA; mol_type = other DNA
cctggaaggctgtctggc

SEQ ID NO: 9262 - DNA, 18 bp, synthetic construct
  source 1..18: mol_type = other DNA; mol_type = other DNA
cctggaaggctgtctgac

SEQ ID NO: 9263 - DNA, 18 bp, synthetic construct
  source 1..18: mol_type = other DNA; mol_type = other DNA
acctggaaggctgtctgg

SEQ ID NO: 9264 - DNA, 18 bp, synthetic construct
  source 1..18: mol_type = other DNA; mol_type = other DNA
acctggaaggctgtctga

SEQ ID NO: 9265 - DNA, 18 bp, synthetic construct
  source 1..18: mol_type = other DNA; mol_type = other DNA
tacctggaaggctgtctg

SEQ ID NO: 9266 - DNA, 18 bp, synthetic construct
  source 1..18: mol_type = other DNA; mol_type = other DNA
tacctggaaggctgtcta

SEQ ID NO: 9267 - DNA, 18 bp, synthetic construct
  source 1..18: mol_type = other DNA; mol_type = other DNA
gtacctggaaggctgtct

SEQ ID NO: 9268 - DNA, 18 bp, synthetic construct
  source 1..18: mol_type = other DNA; mol_type = other DNA
gtacctggaaggctatct

SEQ ID NO: 9269 - DNA, 18 bp, synthetic construct
  source 1..18: mol_type = other DNA; mol_type = other DNA
tgtacctggaaggctgtc

SEQ ID NO: 9270 - DNA, 18 bp, synthetic construct
  source 1..18: mol_type = other DNA; mol_type = other DNA
tgtacctggaaggctatc

SEQ ID NO: 9271 - DNA, 18 bp, synthetic construct
  source 1..18: mol_type = other DNA; mol_type = other DNA
gtgtacctggaaggctgt

SEQ ID NO: 9272 - DNA, 18 bp, synthetic construct
  source 1..18: mol_type = other DNA; mol_type = other DNA
gtgtacctggaaggctat

SEQ ID NO: 9273 - DNA, 18 bp, synthetic construct
  source 1..18: mol_type = other DNA; mol_type = other DNA
ggtgtacctggaaggctg

SEQ ID NO: 9274 - DNA, 18 bp, synthetic construct
  source 1..18: mol_type = other DNA; mol_type = other DNA
ggtgtacctggaaggcta

SEQ ID NO: 9275 - DNA, 18 bp, synthetic construct
  source 1..18: mol_type = other DNA; mol_type = other DNA
cggtgtacctggaaggct

SEQ ID NO: 9276 - DNA, 18 bp, synthetic construct
  source 1..18: mol_type = other DNA; mol_type = other DNA
cggtgtacctggaagact

SEQ ID NO: 9277 - DNA, 18 bp, synthetic construct
  source 1..18: mol_type = other DNA; mol_type = other DNA
ccggtgtacctggaaggc

SEQ ID NO: 9278 - DNA, 18 bp, synthetic construct
  source 1..18: mol_type = other DNA; mol_type = other DNA
ccggtgtacctggaagac

SEQ ID NO: 9279 - DNA, 18 bp, synthetic construct
  source 1..18: mol_type = other DNA; mol_type = other DNA
accggtgtacctggaagg

SEQ ID NO: 9280 - DNA, 18 bp, synthetic construct
  source 1..18: mol_type = other DNA; mol_type = other DNA
accggtgtacctggaaga

SEQ ID NO: 9281 - DNA, 18 bp, synthetic construct
  source 1..18: mol_type = other DNA; mol_type = other DNA
caccggtgtacctggaag

SEQ ID NO: 9282 - DNA, 18 bp, synthetic construct
  source 1..18: mol_type = other DNA; mol_type = other DNA
caccggtgtacctggaaa

SEQ ID NO: 9283 - DNA, 18 bp, synthetic construct
  source 1..18: mol_type = other DNA; mol_type = other DNA
ccaccggtgtacctggaa

SEQ ID NO: 9284 - DNA, 18 bp, synthetic construct
  source 1..18: mol_type = other DNA; mol_type = other DNA
ccaccggtgtacctgaaa

SEQ ID NO: 9285 - DNA, 18 bp, synthetic construct
  source 1..18: mol_type = other DNA; mol_type = other DNA
accaccggtgtacctgga

SEQ ID NO: 9286 - DNA, 18 bp, synthetic construct
  source 1..18: mol_type = other DNA; mol_type = other DNA
accaccggtgtacctgaa

SEQ ID NO: 9287 - DNA, 18 bp, synthetic construct
  source 1..18: mol_type = other DNA; mol_type = other DNA
aaccaccggtgtacctgg

SEQ ID NO: 9288 - DNA, 18 bp, synthetic construct
  source 1..18: mol_type = other DNA; mol_type = other DNA
aaccaccggtgtacctga

SEQ ID NO: 9289 - DNA, 18 bp, synthetic construct
  source 1..18: mol_type = other DNA; mol_type = other DNA
aaaccaccggtgtacctg

SEQ ID NO: 9290 - DNA, 18 bp, synthetic construct
  source 1..18: mol_type = other DNA
aaaccaccggtgtaccta

SEQ ID NO: 9291 - DNA, 18 bp, synthetic construct
  source 1..18: mol_type = other DNA; mol_type = other DNA
taaaccaccggtgtacct

SEQ ID NO: 9292 - DNA, 18 bp, synthetic construct
  source 1..18: mol_type = other DNA; mol_type = other DNA
taaaccaccggtatacct

SEQ ID NO: 9293 - DNA, 18 bp, synthetic construct
  source 1..18: mol_type = other DNA; mol_type = other DNA
gtaaaccaccggtgtacc

SEQ ID NO: 9294 - DNA, 18 bp, synthetic construct
  source 1..18: mol_type = other DNA; mol_type = other DNA
gtaaaccaccggtatacc

SEQ ID NO: 9295 - DNA, 18 bp, synthetic construct
  source 1..18: mol_type = other DNA; mol_type = other DNA
tgtaaaccaccggtgtac

SEQ ID NO: 9296 - DNA, 18 bp, synthetic construct
  source 1..18: mol_type = other DNA; mol_type = other DNA
tgtaaaccaccggtatac

SEQ ID NO: 9297 - DNA, 18 bp, synthetic construct
  source 1..18: mol_type = other DNA; mol_type = other DNA
ctgtaaaccaccggtgta

SEQ ID NO: 9298 - DNA, 18 bp, synthetic construct
  source 1..18: mol_type = other DNA; mol_type = other DNA
ctgtaaaccaccggtata

SEQ ID NO: 9299 - DNA, 18 bp, synthetic construct
  source 1..18: mol_type = other DNA; mol_type = other DNA
cctgtaaaccaccggtgt

SEQ ID NO: 9300 - DNA, 18 bp, synthetic construct
  source 1..18: mol_type = other DNA; mol_type = other DNA
cctgtaaaccaccggtat

SEQ ID NO: 9301 - DNA, 18 bp, synthetic construct
  source 1..18: mol_type = other DNA; mol_type = other DNA
tcctgtaaaccaccggtg

SEQ ID NO: 9302 - DNA, 18 bp, synthetic construct
  source 1..18: mol_type = other DNA; mol_type = other DNA
tcctgtaaaccaccggta

SEQ ID NO: 9303 - DNA, 18 bp, synthetic construct
  source 1..18: mol_type = other DNA; mol_type = other DNA
ctcctgtaaaccaccggt

SEQ ID NO: 9304 - DNA, 18 bp, synthetic construct
  source 1..18: mol_type = other DNA; mol_type = other DNA
ctcctgtaaaccaccgat

SEQ ID NO: 9305 - DNA, 18 bp, synthetic construct
  source 1..18: mol_type = other DNA; mol_type = other DNA
gctcctgtaaaccaccgg

SEQ ID NO: 9306 - DNA, 18 bp, synthetic construct
  source 1..18: mol_type = other DNA; mol_type = other DNA
gctcctgtaaaccaccga

SEQ ID NO: 9307 - DNA, 18 bp, synthetic construct
  source 1..18: mol_type = other DNA; mol_type = other DNA
agctcctgtaaaccaccg

SEQ ID NO: 9308 - DNA, 18 bp, synthetic construct
  source 1..18: mol_type = other DNA; mol_type = other DNA
agctcctgtaaaccacca

SEQ ID NO: 9309 - DNA, 18 bp, synthetic construct
  source 1..18: mol_type = other DNA; mol_type = other DNA
gagctcctgtaaaccacc

SEQ ID NO: 9310 - DNA, 18 bp, synthetic construct
  source 1..18: mol_type = other DNA; mol_type = other DNA
gagctcctataaaccacc

SEQ ID NO: 9311 - DNA, 18 bp, synthetic construct
  source 1..18: mol_type = other DNA; mol_type = other DNA
tgagctcctgtaaaccac

SEQ ID NO: 9312 - DNA, 18 bp, synthetic construct
  source 1..18: mol_type = other DNA; mol_type = other DNA
tgagctcctataaaccac

SEQ ID NO: 9313 - DNA, 18 bp, synthetic construct
  source 1..18: mol_type = other DNA; mol_type = other DNA
ttgagctcctgtaaacca

SEQ ID NO: 9314 - DNA, 18 bp, synthetic construct
  source 1..18: mol_type = other DNA; mol_type = other DNA
ttgagctcctataaacca

SEQ ID NO: 9315 - DNA, 18 bp, synthetic construct
  source 1..18: mol_type = other DNA; mol_type = other DNA
cttgagctcctgtaaacc

SEQ ID NO: 9316 - DNA, 18 bp, synthetic construct
  source 1..18: mol_type = other DNA; mol_type = other DNA
cttgagctcctataaacc

SEQ ID NO: 9317 - DNA, 18 bp, synthetic construct
  source 1..18: mol_type = other DNA; mol_type = other DNA
ccttgagctcctgtaaac

SEQ ID NO: 9318 - DNA, 18 bp, synthetic construct
  source 1..18: mol_type = other DNA; mol_type = other DNA
ccttgagctcctataaac

SEQ ID NO: 9319 - DNA, 18 bp, synthetic construct
  source 1..18: mol_type = other DNA; mol_type = other DNA
gccttgagctcctgtaaa

SEQ ID NO: 9320 - DNA, 18 bp, synthetic construct
  source 1..18: mol_type = other DNA; mol_type = other DNA
gccttgagctcctataaa

SEQ ID NO: 9321 - DNA, 18 bp, synthetic construct
  source 1..18: mol_type = other DNA; mol_type = other DNA
agccttgagctcctgtaa

SEQ ID NO: 9322 - DNA, 18 bp, synthetic construct
  source 1..18: mol_type = other DNA; mol_type = other DNA
agccttgagctcctataa

SEQ ID NO: 9323 - DNA, 18 bp, synthetic construct
  source 1..18: mol_type = other DNA; mol_type = other DNA
cagccttgagctcctgta

SEQ ID NO: 9324 - DNA, 18 bp, synthetic construct
  source 1..18: mol_type = other DNA; mol_type = other DNA
cagccttgagctcctata

SEQ ID NO: 9325 - DNA, 18 bp, synthetic construct
  source 1..18: mol_type = other DNA; mol_type = other DNA
gcagccttgagctcctgt

SEQ ID NO: 9326 - DNA, 18 bp, synthetic construct
  source 1..18: mol_type = other DNA; mol_type = other DNA
gcagccttgagctcctat

SEQ ID NO: 9327 - DNA, 18 bp, synthetic construct
  source 1..18: mol_type = other DNA; mol_type = other DNA
ggcagccttgagctcctg

SEQ ID NO: 9328 - DNA, 18 bp, synthetic construct
  source 1..18: mol_type = other DNA; mol_type = other DNA
ggcagccttgagctccta

SEQ ID NO: 9329 - DNA, 18 bp, synthetic construct
  source 1..18: mol_type = other DNA; mol_type = other DNA
gggcagccttgagctcct

SEQ ID NO: 9330 - DNA, 18 bp, synthetic construct
  source 1..18: mol_type = other DNA; mol_type = other DNA
gggcagccttgaactcct

SEQ ID NO: 9331 - DNA, 18 bp, synthetic construct
  source 1..18: mol_type = other DNA; mol_type = other DNA
agggcagccttgagctcc

SEQ ID NO: 9332 - DNA, 18 bp, synthetic construct
  source 1..18: mol_type = other DNA; mol_type = other DNA
gaggcagccttgagctcc

SEQ ID NO: 9333 - DNA, 18 bp, synthetic construct
  source 1..18: mol_type = other DNA; mol_type = other DNA
ggagcagccttgagctcc

SEQ ID NO: 9334 - DNA, 18 bp, synthetic construct
  source 1..18: mol_type = other DNA; mol_type = other DNA
gggacagccttgagctcc

SEQ ID NO: 9335 - DNA, 18 bp, synthetic construct
  source 1..18: mol_type = other DNA; mol_type = other DNA
tagggcagccttgagctc

SEQ ID NO: 9336 - DNA, 18 bp, synthetic construct
  source 1..18: mol_type = other DNA; mol_type = other DNA
tgaggcagccttgagctc

SEQ ID NO: 9337 - DNA, 18 bp, synthetic construct
  source 1..18: mol_type = other DNA; mol_type = other DNA
tggagcagccttgagctc

SEQ ID NO: 9338 - DNA, 18 bp, synthetic construct
  source 1..18: mol_type = other DNA; mol_type = other DNA
tgggacagccttgagctc

SEQ ID NO: 9339 - DNA, 18 bp, synthetic construct
  source 1..18: mol_type = other DNA; mol_type = other DNA
ctagggcagccttgagct

SEQ ID NO: 9340 - DNA, 18 bp, synthetic construct
  source 1..18: mol_type = other DNA; mol_type = other DNA
ctgaggcagccttgagct

SEQ ID NO: 9341 - DNA, 18 bp, synthetic construct
  source 1..18: mol_type = other DNA; mol_type = other DNA
ctggagcagccttgagct

SEQ ID NO: 9342 - DNA, 18 bp, synthetic construct
  source 1..18: mol_type = other DNA; mol_type = other DNA
ctgggacagccttgagct

SEQ ID NO: 9343 - DNA, 18 bp, synthetic construct
  source 1..18: mol_type = other DNA; mol_type = other DNA
tctagggcagccttgagc

SEQ ID NO: 9344 - DNA, 18 bp, synthetic construct
  source 1..18: mol_type = other DNA; mol_type = other DNA
tctgaggcagccttgagc

SEQ ID NO: 9345 - DNA, 18 bp, synthetic construct
  source 1..18: mol_type = other DNA; mol_type = other DNA
tctggagcagccttgagc

SEQ ID NO: 9346 - DNA, 18 bp, synthetic construct
  source 1..18: mol_type = other DNA; mol_type = other DNA
tctgggacagccttgagc

SEQ ID NO: 9347 - DNA, 18 bp, synthetic construct
  source 1..18: mol_type = other DNA; mol_type = other DNA
ctctagggcagccttgag

SEQ ID NO: 9348 - DNA, 18 bp, synthetic construct
  source 1..18: mol_type = other DNA; mol_type = other DNA
ctctgaggcagccttgag

SEQ ID NO: 9349 - DNA, 18 bp, synthetic construct
  source 1..18: mol_type = other DNA; mol_type = other DNA
ctctggagcagccttgag

SEQ ID NO: 9350 - DNA, 18 bp, synthetic construct
  source 1..18: mol_type = other DNA; mol_type = other DNA
ctctgggacagccttgag

SEQ ID NO: 9351 - DNA, 18 bp, synthetic construct
  source 1..18: mol_type = other DNA; mol_type = other DNA
cctctagggcagccttga

SEQ ID NO: 9352 - DNA, 18 bp, synthetic construct
  source 1..18: mol_type = other DNA; mol_type = other DNA
cctctgaggcagccttga

SEQ ID NO: 9353 - DNA, 18 bp, synthetic construct
  source 1..18: mol_type = other DNA; mol_type = other DNA
cctctggagcagccttga

SEQ ID NO: 9354 - DNA, 18 bp, synthetic construct
  source 1..18: mol_type = other DNA; mol_type = other DNA
cctctgggacagccttga

SEQ ID NO: 9355 - DNA, 18 bp, synthetic construct
  source 1..18: mol_type = other DNA; mol_type = other DNA
acctctagggcagccttg

SEQ ID NO: 9356 - DNA, 18 bp, synthetic construct
  source 1..18: mol_type = other DNA; mol_type = other DNA
acctctgaggcagccttg

SEQ ID NO: 9357 - DNA, 18 bp, synthetic construct
  source 1..18: mol_type = other DNA; mol_type = other DNA
acctctggagcagccttg

SEQ ID NO: 9358 - DNA, 18 bp, synthetic construct
  source 1..18: mol_type = other DNA; mol_type = other DNA
acctctgggacagccttg

SEQ ID NO: 9359 - DNA, 18 bp, synthetic construct
  source 1..18: mol_type = other DNA; mol_type = other DNA
cacctctagggcagcctt

SEQ ID NO: 9360 - DNA, 18 bp, synthetic construct
  source 1..18: mol_type = other DNA; mol_type = other DNA
cacctctgaggcagcctt

SEQ ID NO: 9361 - DNA, 18 bp, synthetic construct
  source 1..18: mol_type = other DNA; mol_type = other DNA
cacctctggagcagcctt

SEQ ID NO: 9362 - DNA, 18 bp, synthetic construct
  source 1..18: mol_type = other DNA; mol_type = other DNA
cacctctgggacagcctt

SEQ ID NO: 9363 - DNA, 18 bp, synthetic construct
  source 1..18: mol_type = other DNA; mol_type = other DNA
acacctctagggcagcct

SEQ ID NO: 9364 - DNA, 18 bp, synthetic construct
  source 1..18: mol_type = other DNA; mol_type = other DNA
acacctctgaggcagcct

SEQ ID NO: 9365 - DNA, 18 bp, synthetic construct
  source 1..18: mol_type = other DNA; mol_type = other DNA
acacctctggagcagcct

SEQ ID NO: 9366 - DNA, 18 bp, synthetic construct
  source 1..18: mol_type = other DNA; mol_type = other DNA
acacctctgggacagcct

SEQ ID NO: 9367 - DNA, 18 bp, synthetic construct
  source 1..18: mol_type = other DNA; mol_type = other DNA
gacacctcttgggcagcc

SEQ ID NO: 9368 - DNA, 18 bp, synthetic construct
  source 1..18: mol_type = other DNA; mol_type = other DNA
gacacctctgtggcagcc

SEQ ID NO: 9369 - DNA, 18 bp, synthetic construct
  source 1..18: mol_type = other DNA; mol_type = other DNA
gacacctctggtgcagcc

SEQ ID NO: 9370 - DNA, 18 bp, synthetic construct
  source 1..18: mol_type = other DNA; mol_type = other DNA
gacacctctgggtcagcc

SEQ ID NO: 9371 - DNA, 18 bp, synthetic construct
  source 1..18: mol_type = other DNA; mol_type = other DNA
agacacctcttgggcagc

SEQ ID NO: 9372 - DNA, 18 bp, synthetic construct
  source 1..18: mol_type = other DNA; mol_type = other DNA
agacacctctgtggcagc

SEQ ID NO: 9373 - DNA, 18 bp, synthetic construct
  source 1..18: mol_type = other DNA; mol_type = other DNA
agacacctctggtgcagc

SEQ ID NO: 9374 - DNA, 18 bp, synthetic construct
  source 1..18: mol_type = other DNA; mol_type = other DNA
agacacctctgggtcagc

SEQ ID NO: 9375 - DNA, 18 bp, synthetic construct
  source 1..18: mol_type = other DNA; mol_type = other DNA
cagacacctcttgggcag

SEQ ID NO: 9376 - DNA, 18 bp, synthetic construct
  source 1..18: mol_type = other DNA; mol_type = other DNA
cagacacctctgtggcag

SEQ ID NO: 9377 - DNA, 18 bp, synthetic construct
  source 1..18: mol_type = other DNA; mol_type = other DNA
cagacacctctggtgcag

SEQ ID NO: 9378 - DNA, 18 bp, synthetic construct
  source 1..18: mol_type = other DNA; mol_type = other DNA
cagacacctctgggtcag

SEQ ID NO: 9379 - DNA, 18 bp, synthetic construct
  source 1..18: mol_type = other DNA; mol_type = other DNA
acagacacctctgggaca

SEQ ID NO: 9380 - DNA, 18 bp, synthetic construct
  source 1..18: mol_type = other DNA; mol_type = other DNA
acagacacctcttgggca

SEQ ID NO: 9381 - DNA, 18 bp, synthetic construct
  source 1..18: mol_type = other DNA; mol_type = other DNA
acagacacctctgtggca

SEQ ID NO: 9382 - DNA, 18 bp, synthetic construct
  source 1..18: mol_type = other DNA; mol_type = other DNA
acagacacctctggtgca

SEQ ID NO: 9383 - DNA, 18 bp, synthetic construct
  source 1..18: mol_type = other DNA; mol_type = other DNA
acagacacctctgggtca

SEQ ID NO: 9384 - DNA, 18 bp, synthetic construct
  source 1..18: mol_type = other DNA; mol_type = other DNA
gacagacacctctgggac

SEQ ID NO: 9385 - DNA, 18 bp, synthetic construct
  source 1..18: mol_type = other DNA; mol_type = other DNA
gacagacacctcttgggc

SEQ ID NO: 9386 - DNA, 18 bp, synthetic construct
  source 1..18: mol_type = other DNA; mol_type = other DNA
gacagacacctctgtggc

SEQ ID NO: 9387 - DNA, 18 bp, synthetic construct
  source 1..18: mol_type = other DNA; mol_type = other DNA
gacagacacctctggtgc

SEQ ID NO: 9388 - DNA, 18 bp, synthetic construct
  source 1..18: mol_type = other DNA; mol_type = other DNA
gacagacacctctgggtc

SEQ ID NO: 9389 - DNA, 18 bp, synthetic construct
  source 1..18: mol_type = other DNA; mol_type = other DNA
agacagacacctctggga

SEQ ID NO: 9390 - DNA, 18 bp, synthetic construct
  source 1..18: mol_type = other DNA; mol_type = other DNA
agacagacacctcttggg

SEQ ID NO: 9391 - DNA, 18 bp, synthetic construct
  source 1..18: mol_type = other DNA; mol_type = other DNA
agacagacacctctgtgg

SEQ ID NO: 9392 - DNA, 18 bp, synthetic construct
  source 1..18: mol_type = other DNA; mol_type = other DNA
agacagacacctctggtg

SEQ ID NO: 9393 - DNA, 18 bp, synthetic construct
  source 1..18: mol_type = other DNA; mol_type = other DNA
agacagacacctctgggt

SEQ ID NO: 9394 - DNA, 18 bp, synthetic construct
  source 1..18: mol_type = other DNA; mol_type = other DNA
gagacagacacctctggg

SEQ ID NO: 9395 - DNA, 18 bp, synthetic construct
  source 1..18: mol_type = other DNA; mol_type = other DNA
gagacagacacctctgga

SEQ ID NO: 9396 - DNA, 18 bp, synthetic construct
  source 1..18: mol_type = other DNA; mol_type = other DNA
agagacagacacctctgg

SEQ ID NO: 9397 - DNA, 18 bp, synthetic construct
  source 1..18: mol_type = other DNA; mol_type = other DNA
agagacagacacctctga

SEQ ID NO: 9398 - DNA, 18 bp, synthetic construct
  source 1..18: mol_type = other DNA; mol_type = other DNA
cagagacagacacctctg

SEQ ID NO: 9399 - DNA, 18 bp, synthetic construct
  source 1..18: mol_type = other DNA; mol_type = other DNA
cagagacagacacctcta

SEQ ID NO: 9400 - DNA, 18 bp, synthetic construct
  source 1..18: mol_type = other DNA; mol_type = other DNA
acagagacagacacctct

SEQ ID NO: 9401 - DNA, 18 bp, synthetic construct
  source 1..18: mol_type = other DNA; mol_type = other DNA
acagagacaaacacctct

SEQ ID NO: 9402 - DNA, 18 bp, synthetic construct
  source 1..18: mol_type = other DNA; mol_type = other DNA
cacagagacagacacctc

SEQ ID NO: 9403 - DNA, 18 bp, synthetic construct
  source 1..18: mol_type = other DNA; mol_type = other DNA
cacagagacaaacacctc

SEQ ID NO: 9404 - DNA, 18 bp, synthetic construct
  source 1..18: mol_type = other DNA; mol_type = other DNA
acacagagacagacacct

SEQ ID NO: 9405 - DNA, 18 bp, synthetic construct
  source 1..18: mol_type = other DNA; mol_type = other DNA
acacagagacaaacacct

SEQ ID NO: 9406 - DNA, 18 bp, synthetic construct
  source 1..18: mol_type = other DNA; mol_type = other DNA
gacacagagacagacacc

SEQ ID NO: 9407 - DNA, 18 bp, synthetic construct
  source 1..18: mol_type = other DNA; mol_type = other DNA
gacacagagacaaacacc

SEQ ID NO: 9408 - DNA, 18 bp, synthetic construct
  source 1..18: mol_type = other DNA; mol_type = other DNA
ggacacagagacagacac

SEQ ID NO: 9409 - DNA, 18 bp, synthetic construct
  source 1..18: mol_type = other DNA; mol_type = other DNA
ggacacagagacaaacac

SEQ ID NO: 9410 - DNA, 18 bp, synthetic construct
  source 1..18: mol_type = other DNA; mol_type = other DNA
tggacacagagacagaca

SEQ ID NO: 9411 - DNA, 18 bp, synthetic construct
  source 1..18: mol_type = other DNA; mol_type = other DNA
tggacacagagacaaaca

SEQ ID NO: 9412 - DNA, 18 bp, synthetic construct
  source 1..18: mol_type = other DNA; mol_type = other DNA
atggacacagagacagac

SEQ ID NO: 9413 - DNA, 18 bp, synthetic construct
  source 1..18: mol_type = other DNA; mol_type = other DNA
atggacacagagacaaac

SEQ ID NO: 9414 - DNA, 18 bp, synthetic construct
  source 1..18: mol_type = other DNA; mol_type = other DNA
catggacacagagacaga

SEQ ID NO: 9415 - DNA, 18 bp, synthetic construct
  source 1..18: mol_type = other DNA; mol_type = other DNA
catggacacagagacaaa

SEQ ID NO: 9416 - DNA, 18 bp, synthetic construct
  source 1..18: mol_type = other DNA; mol_type = other DNA
acatggacacagagacag

SEQ ID NO: 9417 - DNA, 18 bp, synthetic construct
  source 1..18: mol_type = other DNA; mol_type = other DNA
acatggacacagagacaa

SEQ ID NO: 9418 - DNA, 18 bp, synthetic construct
  source 1..18: mol_type = other DNA; mol_type = other DNA
cacatggacacagagaca

SEQ ID NO: 9419 - DNA, 18 bp, synthetic construct
  source 1..18: mol_type = other DNA; mol_type = other DNA
cacatggacacagaaaca

SEQ ID NO: 9420 - DNA, 18 bp, synthetic construct
  source 1..18: mol_type = other DNA; mol_type = other DNA
tcacatggacacagagac

SEQ ID NO: 9421 - DNA, 18 bp, synthetic construct
  source 1..18: mol_type = other DNA; mol_type = other DNA
tcacatggacacagaaac

SEQ ID NO: 9422 - DNA, 18 bp, synthetic construct
  source 1..18: mol_type = other DNA; mol_type = other DNA
gtcacatggacacagaga

SEQ ID NO: 9423 - DNA, 18 bp, synthetic construct
  source 1..18: mol_type = other DNA; mol_type = other DNA
gtcacatggacacagaaa

SEQ ID NO: 9424 - DNA, 18 bp, synthetic construct
  source 1..18: mol_type = other DNA; mol_type = other DNA
agtcacatggacacagag

SEQ ID NO: 9425 - DNA, 18 bp, synthetic construct
  source 1..18: mol_type = other DNA; mol_type = other DNA
agtcacatggacacagaa

SEQ ID NO: 9426 - DNA, 18 bp, synthetic construct
  source 1..18: mol_type = other DNA; mol_type = other DNA
aagtcacatggacacaga

SEQ ID NO: 9427 - DNA, 18 bp, synthetic construct
  source 1..18: mol_type = other DNA; mol_type = other DNA
aagtcacatggacacaaa

SEQ ID NO: 9428 - DNA, 18 bp, synthetic construct
  source 1..18: mol_type = other DNA; mol_type = other DNA
caagtcacatggacacag

SEQ ID NO: 9429 - DNA, 18 bp, synthetic construct
  source 1..18: mol_type = other DNA; mol_type = other DNA
caagtcacatggacacaa

SEQ ID NO: 9430 - DNA, 18 bp, synthetic construct
  source 1..18: mol_type = other DNA; mol_type = other DNA
tcaagtcacatggacaca

SEQ ID NO: 9431 - DNA, 18 bp, synthetic construct
  source 1..18: mol_type = other DNA; mol_type = other DNA
tcaagtcacatgaacaca

SEQ ID NO: 9432 - DNA, 18 bp, synthetic construct
  source 1..18: mol_type = other DNA; mol_type = other DNA
gtcaagtcacatggacac

SEQ ID NO: 9433 - DNA, 18 bp, synthetic construct
  source 1..18: mol_type = other DNA; mol_type = other DNA
gtcaagtcacatgaacac

SEQ ID NO: 9434 - DNA, 18 bp, synthetic construct
  source 1..18: mol_type = other DNA; mol_type = other DNA
agtcaagtcacatggaca

SEQ ID NO: 9435 - DNA, 18 bp, synthetic construct
  source 1..18: mol_type = other DNA; mol_type = other DNA
agtcaagtcacatgaaca

SEQ ID NO: 9436 - DNA, 18 bp, synthetic construct
  source 1..18: mol_type = other DNA; mol_type = other DNA
aagtcaagtcacatggac

SEQ ID NO: 9437 - DNA, 18 bp, synthetic construct
  source 1..18: mol_type = other DNA; mol_type = other DNA
aagtcaagtcacatgaac

SEQ ID NO: 9438 - DNA, 18 bp, synthetic construct
  source 1..18: mol_type = other DNA; mol_type = other DNA
gaagtcaagtcacatgga

SEQ ID NO: 9439 - DNA, 18 bp, synthetic construct
  source 1..18: mol_type = other DNA; mol_type = other DNA
gaagtcaagtcacatgaa

SEQ ID NO: 9440 - DNA, 18 bp, synthetic construct
  source 1..18: mol_type = other DNA; mol_type = other DNA
agaagtcaagtcacatgg

SEQ ID NO: 9441 - DNA, 18 bp, synthetic construct
  source 1..18: mol_type = other DNA; mol_type = other DNA
agaagtcaagtcacatga

SEQ ID NO: 9442 - DNA, 18 bp, synthetic construct
  source 1..18: mol_type = other DNA; mol_type = other DNA
gagaagtcaagtcacatg

SEQ ID NO: 9443 - DNA, 18 bp, synthetic construct
  source 1..18: mol_type = other DNA; mol_type = other DNA
gagaagtcaagtcacata

SEQ ID NO: 9444 - DNA, 18 bp, synthetic construct
  source 1..18: mol_type = other DNA; mol_type = other DNA
agagaagtcaagtcacat

SEQ ID NO: 9445 - DNA, 18 bp, synthetic construct
  source 1..18: mol_type = other DNA; mol_type = other DNA
agagaagtcaaatcacat

SEQ ID NO: 9446 - DNA, 18 bp, synthetic construct
  source 1..18: mol_type = other DNA; mol_type = other DNA
cagagaagtcaagtcaca

SEQ ID NO: 9447 - DNA, 18 bp, synthetic construct
  source 1..18: mol_type = other DNA; mol_type = other DNA
cagagaagtcaaatcaca

SEQ ID NO: 9448 - DNA, 18 bp, synthetic construct
  source 1..18: mol_type = other DNA; mol_type = other DNA
tcagagaagtcaagtcac

SEQ ID NO: 9449 - DNA, 18 bp, synthetic construct
  source 1..18: mol_type = other DNA; mol_type = other DNA
tcagagaagtcaaatcac

SEQ ID NO: 9450 - DNA, 18 bp, synthetic construct
  source 1..18: mol_type = other DNA; mol_type = other DNA
ttcagagaagtcaagtca

SEQ ID NO: 9451 - DNA, 18 bp, synthetic construct
  source 1..18: mol_type = other DNA; mol_type = other DNA
ttcagagaagtcaaatca

SEQ ID NO: 9452 - DNA, 18 bp, synthetic construct
  source 1..18: mol_type = other DNA; mol_type = other DNA
gttcagagaagtcaagtc

SEQ ID NO: 9453 - DNA, 18 bp, synthetic construct
  source 1..18: mol_type = other DNA; mol_type = other DNA
gttcagagaagtcaaatc

SEQ ID NO: 9454 - DNA, 18 bp, synthetic construct
  source 1..18: mol_type = other DNA; mol_type = other DNA
ggttcagagaagtcaagt

SEQ ID NO: 9455 - DNA, 18 bp, synthetic construct
  source 1..18: mol_type = other DNA; mol_type = other DNA
ggttcagagaagtcaaat

SEQ ID NO: 9456 - DNA, 18 bp, synthetic construct
  source 1..18: mol_type = other DNA; mol_type = other DNA
aggttcagagaagtcaag

SEQ ID NO: 9457 - DNA, 18 bp, synthetic construct
  source 1..18: mol_type = other DNA; mol_type = other DNA
aggttcagagaagtcaaa

SEQ ID NO: 9458 - DNA, 18 bp, synthetic construct
  source 1..18: mol_type = other DNA; mol_type = other DNA
aaggttcagagaagtcaa

SEQ ID NO: 9459 - DNA, 18 bp, synthetic construct
  source 1..18: mol_type = other DNA; mol_type = other DNA
aaggttcagagaaatcaa

SEQ ID NO: 9460 - DNA, 18 bp, synthetic construct
  source 1..18: mol_type = other DNA; mol_type = other DNA
caaggttcagagaagtca

SEQ ID NO: 9461 - DNA, 18 bp, synthetic construct
  source 1..18: mol_type = other DNA; mol_type = other DNA
caaggttcagagaaatca

SEQ ID NO: 9462 - DNA, 18 bp, synthetic construct
  source 1..18: mol_type = other DNA; mol_type = other DNA
ccaaggttcagagaagtc

SEQ ID NO: 9463 - DNA, 18 bp, synthetic construct
  source 1..18: mol_type = other DNA; mol_type = other DNA
ccaaggttcagagaaatc

SEQ ID NO: 9464 - DNA, 18 bp, synthetic construct
  source 1..18: mol_type = other DNA; mol_type = other DNA
accaaggttcagagaagt

SEQ ID NO: 9465 - DNA, 18 bp, synthetic construct
  source 1..18: mol_type = other DNA; mol_type = other DNA
accaaggttcagagaaat

SEQ ID NO: 9466 - DNA, 18 bp, synthetic construct
  source 1..18: mol_type = other DNA; mol_type = other DNA
aaccaaggttcagagaag

SEQ ID NO: 9467 - DNA, 18 bp, synthetic construct
  source 1..18: mol_type = other DNA; mol_type = other DNA
aaccaaggttcagagaaa

SEQ ID NO: 9468 - DNA, 18 bp, synthetic construct
  source 1..18: mol_type = other DNA; mol_type = other DNA
gaaccaaggttcagagaa

SEQ ID NO: 9469 - DNA, 18 bp, synthetic construct
  source 1..18: mol_type = other DNA; mol_type = other DNA
gaaccaaggttcagaaaa

SEQ ID NO: 9470 - DNA, 18 bp, synthetic construct
  source 1..18: mol_type = other DNA; mol_type = other DNA
agaaccaaggttcagaga

SEQ ID NO: 9471 - DNA, 18 bp, synthetic construct
  source 1..18: mol_type = other DNA; mol_type = other DNA
agaaccaaggttcagaaa

SEQ ID NO: 9472 - DNA, 18 bp, synthetic construct
  source 1..18: mol_type = other DNA; mol_type = other DNA
aagaaccaaggttcagag

SEQ ID NO: 9473 - DNA, 18 bp, synthetic construct
  source 1..18: mol_type = other DNA; mol_type = other DNA
aagaaccaaggttcagaa

SEQ ID NO: 9474 - DNA, 18 bp, synthetic construct
  source 1..18: mol_type = other DNA; mol_type = other DNA
gaagaaccaaggttcaga

SEQ ID NO: 9475 - DNA, 18 bp, synthetic construct
  source 1..18: mol_type = other DNA; mol_type = other DNA
gaagaaccaaggttcaaa

SEQ ID NO: 9476 - DNA, 18 bp, synthetic construct
  source 1..18: mol_type = other DNA; mol_type = other DNA
ggaagaaccaaggttcag

SEQ ID NO: 9477 - DNA, 18 bp, synthetic construct
  source 1..18: mol_type = other DNA; mol_type = other DNA
ggaagaaccaaggttcaa

SEQ ID NO: 9478 - DNA, 18 bp, synthetic construct
  source 1..18: mol_type = other DNA; mol_type = other DNA
gggaagaaccaaggttca

SEQ ID NO: 9479 - DNA, 18 bp, synthetic construct
  source 1..18: mol_type = other DNA; mol_type = other DNA
gggaagaaccaagattca

SEQ ID NO: 9480 - DNA, 18 bp, synthetic construct
  source 1..18: mol_type = other DNA; mol_type = other DNA
agggaagaaccaaggttc

SEQ ID NO: 9481 - DNA, 18 bp, synthetic construct
  source 1..18: mol_type = other DNA; mol_type = other DNA
agggaagaaccaagattc

SEQ ID NO: 9482 - DNA, 18 bp, synthetic construct
  source 1..18: mol_type = other DNA; mol_type = other DNA
cagggaagaaccaaggtt

SEQ ID NO: 9483 - DNA, 18 bp, synthetic construct
  source 1..18: mol_type = other DNA; mol_type = other DNA
cagggaagaaccaagatt

SEQ ID NO: 9484 - DNA, 18 bp, synthetic construct
  source 1..18: mol_type = other DNA; mol_type = other DNA
ccagggaagaaccaaggt

SEQ ID NO: 9485 - DNA, 18 bp, synthetic construct
  source 1..18: mol_type = other DNA; mol_type = other DNA
ccagggaagaaccaagat

SEQ ID NO: 9486 - DNA, 18 bp, synthetic construct
  source 1..18: mol_type = other DNA; mol_type = other DNA
tccagggaagaaccaagg

SEQ ID NO: 9487 - DNA, 18 bp, synthetic construct
  source 1..18: mol_type = other DNA; mol_type = other DNA
tccagggaagaaccaaga

SEQ ID NO: 9488 - DNA, 18 bp, synthetic construct
  source 1..18: mol_type = other DNA; mol_type = other DNA
ttccagggaagaaccaag

SEQ ID NO: 9489 - DNA, 18 bp, synthetic construct
  source 1..18: mol_type = other DNA; mol_type = other DNA
ttccagggaagaaccaaa

SEQ ID NO: 9490 - DNA, 18 bp, synthetic construct
  source 1..18: mol_type = other DNA; mol_type = other DNA
cttccagggaagaaccaa

SEQ ID NO: 9491 - DNA, 18 bp, synthetic construct
  source 1..18: mol_type = other DNA; mol_type = other DNA
cttccagggaaaaaccaa

SEQ ID NO: 9492 - DNA, 18 bp, synthetic construct
  source 1..18: mol_type = other DNA; mol_type = other DNA
ccttccagggaagaacca

SEQ ID NO: 9493 - DNA, 18 bp, synthetic construct
  source 1..18: mol_type = other DNA; mol_type = other DNA
ccttccagggaaaaacca

SEQ ID NO: 9494 - DNA, 18 bp, synthetic construct
  source 1..18: mol_type = other DNA; mol_type = other DNA
tgctccttctccagttcg

SEQ ID NO: 9495 - DNA, 18 bp, synthetic construct
  source 1..18: mol_type = other DNA; mol_type = other DNA
tgctccttctccagttca

SEQ ID NO: 9496 - DNA, 18 bp, synthetic construct
  source 1..18: mol_type = other DNA; mol_type = other DNA
ctgctccttctccagttc

SEQ ID NO: 9497 - DNA, 18 bp, synthetic construct
  source 1..18: mol_type = other DNA; mol_type = other DNA
ctgctccttctccaattc

SEQ ID NO: 9498 - DNA, 18 bp, synthetic construct
  source 1..18: mol_type = other DNA; mol_type = other DNA
gctgctccttctccagtt

SEQ ID NO: 9499 - DNA, 18 bp, synthetic construct
  source 1..18: mol_type = other DNA; mol_type = other DNA
gctgctccttctccaatt

SEQ ID NO: 9500 - DNA, 18 bp, synthetic construct
  source 1..18: mol_type = other DNA; mol_type = other DNA
agctgctccttctccagt

SEQ ID NO: 9501 - DNA, 18 bp, synthetic construct
  source 1..18: mol_type = other DNA; mol_type = other DNA
agctgctccttctccaat

SEQ ID NO: 9502 - DNA, 18 bp, synthetic construct
  source 1..18: mol_type = other DNA; mol_type = other DNA
cagctgctccttctccag

SEQ ID NO: 9503 - DNA, 18 bp, synthetic construct
  source 1..18: mol_type = other DNA; mol_type = other DNA
cagctgctccttctccaa

SEQ ID NO: 9504 - DNA, 18 bp, synthetic construct
  source 1..18: mol_type = other DNA; mol_type = other DNA
ccagctgctccttctcca

SEQ ID NO: 9505 - DNA, 18 bp, synthetic construct
  source 1..18: mol_type = other DNA; mol_type = other DNA
ccagctactccttctcca

SEQ ID NO: 9506 - DNA, 18 bp, synthetic construct
  source 1..18: mol_type = other DNA; mol_type = other DNA
cccagctgctccttctcc

SEQ ID NO: 9507 - DNA, 18 bp, synthetic construct
  source 1..18: mol_type = other DNA; mol_type = other DNA
cccagctactccttctcc

SEQ ID NO: 9508 - DNA, 18 bp, synthetic construct
  source 1..18: mol_type = other DNA; mol_type = other DNA
ccccagctgctccttctc

SEQ ID NO: 9509 - DNA, 18 bp, synthetic construct
  source 1..18: mol_type = other DNA; mol_type = other DNA
ccccagctactccttctc

SEQ ID NO: 9510 - DNA, 18 bp, synthetic construct
  source 1..18: mol_type = other DNA; mol_type = other DNA
gccccagctgctccttct

SEQ ID NO: 9511 - DNA, 18 bp, synthetic construct
  source 1..18: mol_type = other DNA; mol_type = other DNA
gccccagctactccttct

SEQ ID NO: 9512 - DNA, 18 bp, synthetic construct
  source 1..18: mol_type = other DNA; mol_type = other DNA
agccccagctgctccttc

SEQ ID NO: 9513 - DNA, 18 bp, synthetic construct
  source 1..18: mol_type = other DNA; mol_type = other DNA
agccccagctactccttc

SEQ ID NO: 9514 - DNA, 18 bp, synthetic construct
  source 1..18: mol_type = other DNA; mol_type = other DNA
cagccccagctgctcctt

SEQ ID NO: 9515 - DNA, 18 bp, synthetic construct
  source 1..18: mol_type = other DNA; mol_type = other DNA
cagccccagctactcctt

SEQ ID NO: 9516 - DNA, 18 bp, synthetic construct
  source 1..18: mol_type = other DNA; mol_type = other DNA
ccagccccagctgctcct

SEQ ID NO: 9517 - DNA, 18 bp, synthetic construct
  source 1..18: mol_type = other DNA; mol_type = other DNA
ccagccccagctactcct

SEQ ID NO: 9518 - DNA, 18 bp, synthetic construct
  source 1..18: mol_type = other DNA; mol_type = other DNA
gccagccccagctgctcc

SEQ ID NO: 9519 - DNA, 18 bp, synthetic construct
  source 1..18: mol_type = other DNA; mol_type = other DNA
gccagccccagctactcc

SEQ ID NO: 9520 - DNA, 18 bp, synthetic construct
  source 1..18: mol_type = other DNA; mol_type = other DNA
agccagccccagctgctc

SEQ ID NO: 9521 - DNA, 18 bp, synthetic construct
  source 1..18: mol_type = other DNA; mol_type = other DNA
agccagccccagctactc

SEQ ID NO: 9522 - DNA, 18 bp, synthetic construct
  source 1..18: mol_type = other DNA; mol_type = other DNA
cagccagccccagctgct

SEQ ID NO: 9523 - DNA, 18 bp, synthetic construct
  source 1..18: mol_type = other DNA; mol_type = other DNA
cagccagccccagctact

SEQ ID NO: 9524 - DNA, 18 bp, synthetic construct
  source 1..18: mol_type = other DNA; mol_type = other DNA
ccagccagccccagctgc

SEQ ID NO: 9525 - DNA, 18 bp, synthetic construct
  source 1..18: mol_type = other DNA; mol_type = other DNA
ccagccagccccagctac

SEQ ID NO: 9526 - DNA, 18 bp, synthetic construct
  source 1..18: mol_type = other DNA; mol_type = other DNA
gccagccagccccagctg

SEQ ID NO: 9527 - DNA, 18 bp, synthetic construct
  source 1..18: mol_type = other DNA; mol_type = other DNA
gccagccagccccagcta

SEQ ID NO: 9528 - DNA, 18 bp, synthetic construct
  source 1..18: mol_type = other DNA; mol_type = other DNA
cgccagccagccccagct

SEQ ID NO: 9529 - DNA, 18 bp, synthetic construct
  source 1..18: mol_type = other DNA; mol_type = other DNA
cgccagccagccccaact

SEQ ID NO: 9530 - DNA, 18 bp, synthetic construct
  source 1..18: mol_type = other DNA; mol_type = other DNA
tcgccagccagccccagc

SEQ ID NO: 9531 - DNA, 18 bp, synthetic construct
  source 1..18: mol_type = other DNA; mol_type = other DNA
tcgccagccagccccaac

SEQ ID NO: 9532 - DNA, 18 bp, synthetic construct
  source 1..18: mol_type = other DNA; mol_type = other DNA
ctcgccagccagccccag

SEQ ID NO: 9533 - DNA, 18 bp, synthetic construct
  source 1..18: mol_type = other DNA; mol_type = other DNA
ctcgccagccagccccaa

SEQ ID NO: 9534 - DNA, 18 bp, synthetic construct
  source 1..18: mol_type = other DNA; mol_type = other DNA
cctcgccagccagcccca

SEQ ID NO: 9535 - DNA, 18 bp, synthetic construct
  source 1..18: mol_type = other DNA; mol_type = other DNA
cctcgccagccaacccca

SEQ ID NO: 9536 - DNA, 18 bp, synthetic construct
  source 1..18: mol_type = other DNA; mol_type = other DNA
gcctcgccagccagcccc

SEQ ID NO: 9537 - DNA, 18 bp, synthetic construct
  source 1..18: mol_type = other DNA; mol_type = other DNA
gcctcgccagccaacccc

SEQ ID NO: 9538 - DNA, 18 bp, synthetic construct
  source 1..18: mol_type = other DNA; mol_type = other DNA
tgcctcgccagccagccc

SEQ ID NO: 9539 - DNA, 18 bp, synthetic construct
  source 1..18: mol_type = other DNA; mol_type = other DNA
tgcctcgccagccaaccc

SEQ ID NO: 9540 - DNA, 18 bp, synthetic construct
  source 1..18: mol_type = other DNA; mol_type = other DNA
ttgcctcgccagccagcc

SEQ ID NO: 9541 - DNA, 18 bp, synthetic construct
  source 1..18: mol_type = other DNA; mol_type = other DNA
ttgcctcgccagccaacc

SEQ ID NO: 9542 - DNA, 18 bp, synthetic construct
  source 1..18: mol_type = other DNA; mol_type = other DNA
tttgcctcgccagccagc

SEQ ID NO: 9543 - DNA, 18 bp, synthetic construct
  source 1..18: mol_type = other DNA; mol_type = other DNA
tttgcctcgccagccaac

SEQ ID NO: 9544 - DNA, 18 bp, synthetic construct
  source 1..18: mol_type = other DNA; mol_type = other DNA
ctttgcctcgccagccag

SEQ ID NO: 9545 - DNA, 18 bp, synthetic construct
  source 1..18: mol_type = other DNA; mol_type = other DNA
ctttgcctcgccagccaa

SEQ ID NO: 9546 - DNA, 18 bp, synthetic construct
  source 1..18: mol_type = other DNA; mol_type = other DNA
gctttgcctcgccagcca

SEQ ID NO: 9547 - DNA, 18 bp, synthetic construct
  source 1..18: mol_type = other DNA; mol_type = other DNA
gctttgcctcgccaacca

SEQ ID NO: 9548 - DNA, 18 bp, synthetic construct
  source 1..18: mol_type = other DNA; mol_type = other DNA
agctttgcctcgccagcc

SEQ ID NO: 9549 - DNA, 18 bp, synthetic construct
  source 1..18: mol_type = other DNA; mol_type = other DNA
agctttgcctcgccaacc

SEQ ID NO: 9550 - DNA, 18 bp, synthetic construct
  source 1..18: mol_type = other DNA; mol_type = other DNA
cagctttgcctcgccagc

SEQ ID NO: 9551 - DNA, 18 bp, synthetic construct
  source 1..18: mol_type = other DNA; mol_type = other DNA
cagctttgcctcgccaac

SEQ ID NO: 9552 - DNA, 18 bp, synthetic construct
  source 1..18: mol_type = other DNA; mol_type = other DNA
ccagctttgcctcgccag

SEQ ID NO: 9553 - DNA, 18 bp, synthetic construct
  source 1..18: mol_type = other DNA; mol_type = other DNA
ccagctttgcctcgccaa

SEQ ID NO: 9554 - DNA, 18 bp, synthetic construct
  source 1..18: mol_type = other DNA; mol_type = other DNA
accagctttgcctcgcca

SEQ ID NO: 9555 - DNA, 18 bp, synthetic construct
  source 1..18: mol_type = other DNA; mol_type = other DNA
accagctttgcctcacca

SEQ ID NO: 9556 - DNA, 18 bp, synthetic construct
  source 1..18: mol_type = other DNA; mol_type = other DNA
caccagctttgcctcgcc

SEQ ID NO: 9557 - DNA, 18 bp, synthetic construct
  source 1..18: mol_type = other DNA; mol_type = other DNA
caccagctttgcctcacc

SEQ ID NO: 9558 - DNA, 18 bp, synthetic construct
  source 1..18: mol_type = other DNA; mol_type = other DNA
gcaccagctttgcctcgc

SEQ ID NO: 9559 - DNA, 18 bp, synthetic construct
  source 1..18: mol_type = other DNA; mol_type = other DNA
gcaccagctttgcctcac

SEQ ID NO: 9560 - DNA, 18 bp, synthetic construct
  source 1..18: mol_type = other DNA; mol_type = other DNA
agcaccagctttgcctcg

SEQ ID NO: 9561 - DNA, 18 bp, synthetic construct
  source 1..18: mol_type = other DNA; mol_type = other DNA
agcaccagctttgcctca

SEQ ID NO: 9562 - DNA, 18 bp, synthetic construct
  source 1..18: mol_type = other DNA; mol_type = other DNA
cagcaccagctttgcctc

SEQ ID NO: 9563 - DNA, 18 bp, synthetic construct
  source 1..18: mol_type = other DNA; mol_type = other DNA
cagcaccagctttacctc

SEQ ID NO: 9564 - DNA, 18 bp, synthetic construct
  source 1..18: mol_type = other DNA; mol_type = other DNA
gcagcaccagctttgcct

SEQ ID NO: 9565 - DNA, 18 bp, synthetic construct
  source 1..18: mol_type = other DNA; mol_type = other DNA
gcagcaccagctttacct

SEQ ID NO: 9566 - DNA, 18 bp, synthetic construct
  source 1..18: mol_type = other DNA; mol_type = other DNA
agcagcaccagctttgcc

SEQ ID NO: 9567 - DNA, 18 bp, synthetic construct
  source 1..18: mol_type = other DNA; mol_type = other DNA
agcagcaccagctttacc

SEQ ID NO: 9568 - DNA, 18 bp, synthetic construct
  source 1..18: mol_type = other DNA; mol_type = other DNA
gagcagcaccagctttgc

SEQ ID NO: 9569 - DNA, 18 bp, synthetic construct
  source 1..18: mol_type = other DNA; mol_type = other DNA
gagcagcaccagctttac

SEQ ID NO: 9570 - DNA, 18 bp, synthetic construct
  source 1..18: mol_type = other DNA; mol_type = other DNA
tgagcagcaccagctttg

SEQ ID NO: 9571 - DNA, 18 bp, synthetic construct
  source 1..18: mol_type = other DNA; mol_type = other DNA
tgagcagcaccagcttta

SEQ ID NO: 9572 - DNA, 18 bp, synthetic construct
  source 1..18: mol_type = other DNA; mol_type = other DNA
ctgagcagcaccagcttt

SEQ ID NO: 9573 - DNA, 18 bp, synthetic construct
  source 1..18: mol_type = other DNA; mol_type = other DNA
ctgagcagcaccaacttt

SEQ ID NO: 9574 - DNA, 18 bp, synthetic construct
  source 1..18: mol_type = other DNA; mol_type = other DNA
gctgagcagcaccagctt

SEQ ID NO: 9575 - DNA, 18 bp, synthetic construct
  source 1..18: mol_type = other DNA; mol_type = other DNA
gctgagcagcaccaactt

SEQ ID NO: 9576 - DNA, 18 bp, synthetic construct
  source 1..18: mol_type = other DNA; mol_type = other DNA
ggctgagcagcaccagct

SEQ ID NO: 9577 - DNA, 18 bp, synthetic construct
  source 1..18: mol_type = other DNA; mol_type = other DNA
ggctgagcagcaccaact

SEQ ID NO: 9578 - DNA, 18 bp, synthetic construct
  source 1..18: mol_type = other DNA; mol_type = other DNA
gggctgagcagcaccagc

SEQ ID NO: 9579 - DNA, 18 bp, synthetic construct
  source 1..18: mol_type = other DNA; mol_type = other DNA
gggctgagcagcaccaac

SEQ ID NO: 9580 - DNA, 18 bp, synthetic construct
  source 1..18: mol_type = other DNA; mol_type = other DNA
tgggctgagcagcaccag

SEQ ID NO: 9581 - DNA, 18 bp, synthetic construct
  source 1..18: mol_type = other DNA; mol_type = other DNA
gtggctgagcagcaccag

SEQ ID NO: 9582 - DNA, 18 bp, synthetic construct
  source 1..18: mol_type = other DNA; mol_type = other DNA
ggtgctgagcagcaccag

SEQ ID NO: 9583 - DNA, 18 bp, synthetic construct
  source 1..18: mol_type = other DNA; mol_type = other DNA
gggtctgagcagcaccag

SEQ ID NO: 9584 - DNA, 18 bp, synthetic construct
  source 1..18: mol_type = other DNA; mol_type = other DNA
atgggctgagcagcacca

SEQ ID NO: 9585 - DNA, 18 bp, synthetic construct
  source 1..18: mol_type = other DNA; mol_type = other DNA
agtggctgagcagcacca

SEQ ID NO: 9586 - DNA, 18 bp, synthetic construct
  source 1..18: mol_type = other DNA; mol_type = other DNA
aggtgctgagcagcacca

SEQ ID NO: 9587 - DNA, 18 bp, synthetic construct
  source 1..18: mol_type = other DNA; mol_type = other DNA
agggtctgagcagcacca

SEQ ID NO: 9588 - DNA, 18 bp, synthetic construct
  source 1..18: mol_type = other DNA; mol_type = other DNA
gatgggctgagcagcacc

SEQ ID NO: 9589 - DNA, 18 bp, synthetic construct
  source 1..18: mol_type = other DNA; mol_type = other DNA
gagtggctgagcagcacc

SEQ ID NO: 9590 - DNA, 18 bp, synthetic construct
  source 1..18: mol_type = other DNA; mol_type = other DNA
gaggtgctgagcagcacc

SEQ ID NO: 9591 - DNA, 18 bp, synthetic construct
  source 1..18: mol_type = other DNA; mol_type = other DNA
gagggtctgagcagcacc

SEQ ID NO: 9592 - DNA, 18 bp, synthetic construct
  source 1..18: mol_type = other DNA; mol_type = other DNA
ggatgggctgagcagcac

SEQ ID NO: 9593 - DNA, 18 bp, synthetic construct
  source 1..18: mol_type = other DNA; mol_type = other DNA
ggagtggctgagcagcac

SEQ ID NO: 9594 - DNA, 18 bp, synthetic construct
  source 1..18: mol_type = other DNA; mol_type = other DNA
ggaggtgctgagcagcac

SEQ ID NO: 9595 - DNA, 18 bp, synthetic construct
  source 1..18: mol_type = other DNA; mol_type = other DNA
ggagggtctgagcagcac

SEQ ID NO: 9596 - DNA, 18 bp, synthetic construct
  source 1..18: mol_type = other DNA; mol_type = other DNA
gggatgggctgagcagca

SEQ ID NO: 9597 - DNA, 18 bp, synthetic construct
  source 1..18: mol_type = other DNA; mol_type = other DNA
gggagtggctgagcagca

SEQ ID NO: 9598 - DNA, 18 bp, synthetic construct
  source 1..18: mol_type = other DNA; mol_type = other DNA
gggaggtgctgagcagca

SEQ ID NO: 9599 - DNA, 18 bp, synthetic construct
  source 1..18: mol_type = other DNA; mol_type = other DNA
gggagggtctgagcagca

SEQ ID NO: 9600 - DNA, 18 bp, synthetic construct
  source 1..18: mol_type = other DNA; mol_type = other DNA
agggatgggctgagcagc

SEQ ID NO: 9601 - DNA, 18 bp, synthetic construct
  source 1..18: mol_type = other DNA; mol_type = other DNA
agggagtggctgagcagc

SEQ ID NO: 9602 - DNA, 18 bp, synthetic construct
  source 1..18: mol_type = other DNA; mol_type = other DNA
agggaggtgctgagcagc

SEQ ID NO: 9603 - DNA, 18 bp, synthetic construct
  source 1..18: mol_type = other DNA; mol_type = other DNA
agggagggtctgagcagc

SEQ ID NO: 9604 - DNA, 18 bp, synthetic construct
  source 1..18: mol_type = other DNA; mol_type = other DNA
cagggatgggctgagcag

SEQ ID NO: 9605 - DNA, 18 bp, synthetic construct
  source 1..18: mol_type = other DNA; mol_type = other DNA
cagggagtggctgagcag

SEQ ID NO: 9606 - DNA, 18 bp, synthetic construct
  source 1..18: mol_type = other DNA; mol_type = other DNA
cagggaggtgctgagcag

SEQ ID NO: 9607 - DNA, 18 bp, synthetic construct
  source 1..18: mol_type = other DNA; mol_type = other DNA
cagggagggtctgagcag

SEQ ID NO: 9608 - DNA, 18 bp, synthetic construct
  source 1..18: mol_type = other DNA; mol_type = other DNA
gcagggatgggctgagca

SEQ ID NO: 9609 - DNA, 18 bp, synthetic construct
  source 1..18: mol_type = other DNA; mol_type = other DNA
gcagggagtggctgagca

SEQ ID NO: 9610 - DNA, 18 bp, synthetic construct
  source 1..18: mol_type = other DNA; mol_type = other DNA
gcagggaggtgctgagca

SEQ ID NO: 9611 - DNA, 18 bp, synthetic construct
  source 1..18: mol_type = other DNA; mol_type = other DNA
gcagggagggtctgagca

SEQ ID NO: 9612 - DNA, 18 bp, synthetic construct
  source 1..18: mol_type = other DNA; mol_type = other DNA
agcagggatgggctgagc

SEQ ID NO: 9613 - DNA, 18 bp, synthetic construct
  source 1..18: mol_type = other DNA; mol_type = other DNA
agcagggagtggctgagc

SEQ ID NO: 9614 - DNA, 18 bp, synthetic construct
  source 1..18: mol_type = other DNA; mol_type = other DNA
agcagggaggtgctgagc

SEQ ID NO: 9615 - DNA, 18 bp, synthetic construct
  source 1..18: mol_type = other DNA; mol_type = other DNA
agcagggagggtctgagc

SEQ ID NO: 9616 - DNA, 18 bp, synthetic construct
  source 1..18: mol_type = other DNA; mol_type = other DNA
gagcagggatgggctgag

SEQ ID NO: 9617 - DNA, 18 bp, synthetic construct
  source 1..18: mol_type = other DNA; mol_type = other DNA
gagcagggagtggctgag

SEQ ID NO: 9618 - DNA, 18 bp, synthetic construct
  source 1..18: mol_type = other DNA; mol_type = other DNA
gagcagggaggtgctgag

SEQ ID NO: 9619 - DNA, 18 bp, synthetic construct
  source 1..18: mol_type = other DNA; mol_type = other DNA
gagcagggagggtctgag

SEQ ID NO: 9620 - DNA, 18 bp, synthetic construct
  source 1..18: mol_type = other DNA; mol_type = other DNA
ggagcagggatgggctga

SEQ ID NO: 9621 - DNA, 18 bp, synthetic construct
  source 1..18: mol_type = other DNA; mol_type = other DNA
ggagcagggagtggctga

SEQ ID NO: 9622 - DNA, 18 bp, synthetic construct
  source 1..18: mol_type = other DNA; mol_type = other DNA
ggagcagggaggtgctga

SEQ ID NO: 9623 - DNA, 18 bp, synthetic construct
  source 1..18: mol_type = other DNA; mol_type = other DNA
ggagcagggagggtctga

SEQ ID NO: 9624 - DNA, 18 bp, synthetic construct
  source 1..18: mol_type = other DNA; mol_type = other DNA
aggagcagggatgggctg

SEQ ID NO: 9625 - DNA, 18 bp, synthetic construct
  source 1..18: mol_type = other DNA; mol_type = other DNA
aggagcagggagtggctg

SEQ ID NO: 9626 - DNA, 18 bp, synthetic construct
  source 1..18: mol_type = other DNA; mol_type = other DNA
aggagcagggaggtgctg

SEQ ID NO: 9627 - DNA, 18 bp, synthetic construct
  source 1..18: mol_type = other DNA; mol_type = other DNA
aggagcagggagggtctg

SEQ ID NO: 9628 - DNA, 18 bp, synthetic construct
  source 1..18: mol_type = other DNA; mol_type = other DNA
gaggagcagggagggact

SEQ ID NO: 9629 - DNA, 18 bp, synthetic construct
  source 1..18: mol_type = other DNA; mol_type = other DNA
gaggagcagggatgggct

SEQ ID NO: 9630 - DNA, 18 bp, synthetic construct
  source 1..18: mol_type = other DNA; mol_type = other DNA
gaggagcagggagtggct

SEQ ID NO: 9631 - DNA, 18 bp, synthetic construct
  source 1..18: mol_type = other DNA; mol_type = other DNA
gaggagcagggaggtgct

SEQ ID NO: 9632 - DNA, 18 bp, synthetic construct
  source 1..18: mol_type = other DNA; mol_type = other DNA
gaggagcagggagggtct

SEQ ID NO: 9633 - DNA, 18 bp, synthetic construct
  source 1..18: mol_type = other DNA; mol_type = other DNA
tgaggagcagggagggac

SEQ ID NO: 9634 - DNA, 18 bp, synthetic construct
  source 1..18: mol_type = other DNA; mol_type = other DNA
tgaggagcagggatgggc

SEQ ID NO: 9635 - DNA, 18 bp, synthetic construct
  source 1..18: mol_type = other DNA; mol_type = other DNA
tgaggagcagggagtggc

SEQ ID NO: 9636 - DNA, 18 bp, synthetic construct
  source 1..18: mol_type = other DNA; mol_type = other DNA
tgaggagcagggaggtgc

SEQ ID NO: 9637 - DNA, 18 bp, synthetic construct
  source 1..18: mol_type = other DNA; mol_type = other DNA
tgaggagcagggagggtc

SEQ ID NO: 9638 - DNA, 18 bp, synthetic construct
  source 1..18: mol_type = other DNA; mol_type = other DNA
ttgaggagcagggaggga

SEQ ID NO: 9639 - DNA, 18 bp, synthetic construct
  source 1..18: mol_type = other DNA; mol_type = other DNA
ttgaggagcagggatggg

SEQ ID NO: 9640 - DNA, 18 bp, synthetic construct
  source 1..18: mol_type = other DNA; mol_type = other DNA
ttgaggagcagggagtgg

SEQ ID NO: 9641 - DNA, 18 bp, synthetic construct
  source 1..18: mol_type = other DNA; mol_type = other DNA
ttgaggagcagggaggtg

SEQ ID NO: 9642 - DNA, 18 bp, synthetic construct
  source 1..18: mol_type = other DNA; mol_type = other DNA
ttgaggagcagggagggt

SEQ ID NO: 9643 - DNA, 18 bp, synthetic construct
  source 1..18: mol_type = other DNA; mol_type = other DNA
cttgaggagcagggaggg

SEQ ID NO: 9644 - DNA, 18 bp, synthetic construct
  source 1..18: mol_type = other DNA; mol_type = other DNA
cttgaggagcagggagga

SEQ ID NO: 9645 - DNA, 18 bp, synthetic construct
  source 1..18: mol_type = other DNA; mol_type = other DNA
ccttgaggagcagggagg

SEQ ID NO: 9646 - DNA, 18 bp, synthetic construct
  source 1..18: mol_type = other DNA; mol_type = other DNA
ccttgaggagcagggaga

SEQ ID NO: 9647 - DNA, 18 bp, synthetic construct
  source 1..18: mol_type = other DNA; mol_type = other DNA
gccttgaggagcagggag

SEQ ID NO: 9648 - DNA, 18 bp, synthetic construct
  source 1..18: mol_type = other DNA; mol_type = other DNA
gccttgaggagcagggaa

SEQ ID NO: 9649 - DNA, 18 bp, synthetic construct
  source 1..18: mol_type = other DNA; mol_type = other DNA
ggccttgaggagcaggga

SEQ ID NO: 9650 - DNA, 18 bp, synthetic construct
  source 1..18: mol_type = other DNA; mol_type = other DNA
ggccttgaggagcaggaa

SEQ ID NO: 9651 - DNA, 18 bp, synthetic construct
  source 1..18: mol_type = other DNA; mol_type = other DNA
aggccttgaggagcaggg

SEQ ID NO: 9652 - DNA, 18 bp, synthetic construct
  source 1..18: mol_type = other DNA; mol_type = other DNA
aggccttgaggagcagga

SEQ ID NO: 9653 - DNA, 18 bp, synthetic construct
  source 1..18: mol_type = other DNA; mol_type = other DNA
aaggccttgaggagcagg

SEQ ID NO: 9654 - DNA, 18 bp, synthetic construct
  source 1..18: mol_type = other DNA; mol_type = other DNA
aaggccttgaggagcaga

SEQ ID NO: 9655 - DNA, 18 bp, synthetic construct
  source 1..18: mol_type = other DNA; mol_type = other DNA
caaggccttgaggagcag

SEQ ID NO: 9656 - DNA, 18 bp, synthetic construct
  source 1..18: mol_type = other DNA; mol_type = other DNA
caaggccttgaggagcaa

SEQ ID NO: 9657 - DNA, 18 bp, synthetic construct
  source 1..18: mol_type = other DNA; mol_type = other DNA
tcaaggccttgaggagca

SEQ ID NO: 9658 - DNA, 18 bp, synthetic construct
  source 1..18: mol_type = other DNA; mol_type = other DNA
tcaaggccttgaggaaca

SEQ ID NO: 9659 - DNA, 18 bp, synthetic construct
  source 1..18: mol_type = other DNA; mol_type = other DNA
gtcaaggccttgaggagc

SEQ ID NO: 9660 - DNA, 18 bp, synthetic construct
  source 1..18: mol_type = other DNA; mol_type = other DNA
gtcaaggccttgaggaac

SEQ ID NO: 9661 - DNA, 18 bp, synthetic construct
  source 1..18: mol_type = other DNA; mol_type = other DNA
ggtcaaggccttgaggag

SEQ ID NO: 9662 - DNA, 18 bp, synthetic construct
  source 1..18: mol_type = other DNA; mol_type = other DNA
ggtcaaggccttgaggaa

SEQ ID NO: 9663 - DNA, 18 bp, synthetic construct
  source 1..18: mol_type = other DNA; mol_type = other DNA
aggtcaaggccttgagga

SEQ ID NO: 9664 - DNA, 18 bp, synthetic construct
  source 1..18: mol_type = other DNA; mol_type = other DNA
aggtcaaggccttgagaa

SEQ ID NO: 9665 - DNA, 18 bp, synthetic construct
  source 1..18: mol_type = other DNA; mol_type = other DNA
gaggtcaaggccttgagg

SEQ ID NO: 9666 - DNA, 18 bp, synthetic construct
  source 1..18: mol_type = other DNA; mol_type = other DNA
gaggtcaaggccttgaga

SEQ ID NO: 9667 - DNA, 18 bp, synthetic construct
  source 1..18: mol_type = other DNA; mol_type = other DNA
ggaggtcaaggccttgag

SEQ ID NO: 9668 - DNA, 18 bp, synthetic construct
  source 1..18: mol_type = other DNA; mol_type = other DNA
ggaggtcaaggccttgaa

SEQ ID NO: 9669 - DNA, 18 bp, synthetic construct
  source 1..18: mol_type = other DNA; mol_type = other DNA
gggaggtcaaggccttga

SEQ ID NO: 9670 - DNA, 18 bp, synthetic construct
  source 1..18: mol_type = other DNA; mol_type = other DNA
gggaggtcaaggccttaa

SEQ ID NO: 9671 - DNA, 18 bp, synthetic construct
  source 1..18: mol_type = other DNA; mol_type = other DNA
agggaggtcaaggccttg

SEQ ID NO: 9672 - DNA, 18 bp, synthetic construct
  source 1..18: mol_type = other DNA; mol_type = other DNA
gaggaggtcaaggccttg

SEQ ID NO: 9673 - DNA, 18 bp, synthetic construct
  source 1..18: mol_type = other DNA; mol_type = other DNA
ggagaggtcaaggccttg

SEQ ID NO: 9674 - DNA, 18 bp, synthetic construct
  source 1..18: mol_type = other DNA; mol_type = other DNA
gggaaggtcaaggccttg

SEQ ID NO: 9675 - DNA, 18 bp, synthetic construct
  source 1..18: mol_type = other DNA; mol_type = other DNA
atgggaggtcaaggcctt

SEQ ID NO: 9676 - DNA, 18 bp, synthetic construct
  source 1..18: mol_type = other DNA; mol_type = other DNA
agtggaggtcaaggcctt

SEQ ID NO: 9677 - DNA, 18 bp, synthetic construct
  source 1..18: mol_type = other DNA; mol_type = other DNA
aggtgaggtcaaggcctt

SEQ ID NO: 9678 - DNA, 18 bp, synthetic construct
  source 1..18: mol_type = other DNA; mol_type = other DNA
agggtaggtcaaggcctt

SEQ ID NO: 9679 - DNA, 18 bp, synthetic construct
  source 1..18: mol_type = other DNA; mol_type = other DNA
aatgggaggtcaaggcct

SEQ ID NO: 9680 - DNA, 18 bp, synthetic construct
  source 1..18: mol_type = other DNA; mol_type = other DNA
aagtggaggtcaaggcct

SEQ ID NO: 9681 - DNA, 18 bp, synthetic construct
  source 1..18: mol_type = other DNA; mol_type = other DNA
aaggtgaggtcaaggcct

SEQ ID NO: 9682 - DNA, 18 bp, synthetic construct
  source 1..18: mol_type = other DNA; mol_type = other DNA
aagggtaggtcaaggcct

SEQ ID NO: 9683 - DNA, 18 bp, synthetic construct
  source 1..18: mol_type = other DNA; mol_type = other DNA
aaatgggaggtcaaggcc

SEQ ID NO: 9684 - DNA, 18 bp, synthetic construct
  source 1..18: mol_type = other DNA; mol_type = other DNA
aaagtggaggtcaaggcc

SEQ ID NO: 9685 - DNA, 18 bp, synthetic construct
  source 1..18: mol_type = other DNA; mol_type = other DNA
aaaggtgaggtcaaggcc

SEQ ID NO: 9686 - DNA, 18 bp, synthetic construct
  source 1..18: mol_type = other DNA; mol_type = other DNA
aaagggtaggtcaaggcc

SEQ ID NO: 9687 - DNA, 18 bp, synthetic construct
  source 1..18: mol_type = other DNA; mol_type = other DNA
gaaatgggaggtcaaggc

SEQ ID NO: 9688 - DNA, 18 bp, synthetic construct
  source 1..18: mol_type = other DNA; mol_type = other DNA
gaaagtggaggtcaaggc

SEQ ID NO: 9689 - DNA, 18 bp, synthetic construct
  source 1..18: mol_type = other DNA; mol_type = other DNA
gaaaggtgaggtcaaggc

SEQ ID NO: 9690 - DNA, 18 bp, synthetic construct
  source 1..18: mol_type = other DNA; mol_type = other DNA
gaaagggtaggtcaaggc

SEQ ID NO: 9691 - DNA, 18 bp, synthetic construct
  source 1..18: mol_type = other DNA; mol_type = other DNA
ggaaatgggaggtcaagg

SEQ ID NO: 9692 - DNA, 18 bp, synthetic construct
  source 1..18: mol_type = other DNA; mol_type = other DNA
ggaaagtggaggtcaagg

SEQ ID NO: 9693 - DNA, 18 bp, synthetic construct
  source 1..18: mol_type = other DNA; mol_type = other DNA
ggaaaggtgaggtcaagg

SEQ ID NO: 9694 - DNA, 18 bp, synthetic construct
  source 1..18: mol_type = other DNA; mol_type = other DNA
ggaaagggtaggtcaagg

SEQ ID NO: 9695 - DNA, 18 bp, synthetic construct
  source 1..18: mol_type = other DNA; mol_type = other DNA
gggaaatgggaggtcaag

SEQ ID NO: 9696 - DNA, 18 bp, synthetic construct
  source 1..18: mol_type = other DNA; mol_type = other DNA
gggaaagtggaggtcaag

SEQ ID NO: 9697 - DNA, 18 bp, synthetic construct
  source 1..18: mol_type = other DNA; mol_type = other DNA
gggaaaggtgaggtcaag

SEQ ID NO: 9698 - DNA, 18 bp, synthetic construct
  source 1..18: mol_type = other DNA; mol_type = other DNA
gggaaagggtaggtcaag

SEQ ID NO: 9699 - DNA, 18 bp, synthetic construct
  source 1..18: mol_type = other DNA; mol_type = other DNA
agggaaatgggaggtcaa

SEQ ID NO: 9700 - DNA, 18 bp, synthetic construct
  source 1..18: mol_type = other DNA; mol_type = other DNA
agggaaagtggaggtcaa

SEQ ID NO: 9701 - DNA, 18 bp, synthetic construct
  source 1..18: mol_type = other DNA; mol_type = other DNA
agggaaaggtgaggtcaa

SEQ ID NO: 9702 - DNA, 18 bp, synthetic construct
  source 1..18: mol_type = other DNA; mol_type = other DNA
agggaaagggtaggtcaa

SEQ ID NO: 9703 - DNA, 18 bp, synthetic construct
  source 1..18: mol_type = other DNA; mol_type = other DNA
gagggaaatgggaggtca

SEQ ID NO: 9704 - DNA, 18 bp, synthetic construct
  source 1..18: mol_type = other DNA; mol_type = other DNA
gagggaaagtggaggtca

SEQ ID NO: 9705 - DNA, 18 bp, synthetic construct
  source 1..18: mol_type = other DNA; mol_type = other DNA
gagggaaaggtgaggtca

SEQ ID NO: 9706 - DNA, 18 bp, synthetic construct
  source 1..18: mol_type = other DNA; mol_type = other DNA
gagggaaagggtaggtca

SEQ ID NO: 9707 - DNA, 18 bp, synthetic construct
  source 1..18: mol_type = other DNA; mol_type = other DNA
tgagggaaatgggaggtc

SEQ ID NO: 9708 - DNA, 18 bp, synthetic construct
  source 1..18: mol_type = other DNA; mol_type = other DNA
tgagggaaagtggaggtc

SEQ ID NO: 9709 - DNA, 18 bp, synthetic construct
  source 1..18: mol_type = other DNA; mol_type = other DNA
tgagggaaaggtgaggtc

SEQ ID NO: 9710 - DNA, 18 bp, synthetic construct
  source 1..18: mol_type = other DNA; mol_type = other DNA
tgagggaaagggtaggtc

SEQ ID NO: 9711 - DNA, 18 bp, synthetic construct
  source 1..18: mol_type = other DNA; mol_type = other DNA
ctgagggaaatgggaggt

SEQ ID NO: 9712 - DNA, 18 bp, synthetic construct
  source 1..18: mol_type = other DNA; mol_type = other DNA
ctgagggaaagtggaggt

SEQ ID NO: 9713 - DNA, 18 bp, synthetic construct
  source 1..18: mol_type = other DNA; mol_type = other DNA
ctgagggaaaggtgaggt

SEQ ID NO: 9714 - DNA, 18 bp, synthetic construct
  source 1..18: mol_type = other DNA; mol_type = other DNA
ctgagggaaagggtaggt

SEQ ID NO: 9715 - DNA, 18 bp, synthetic construct
  source 1..18: mol_type = other DNA; mol_type = other DNA
cctgagggaaatgggagg

SEQ ID NO: 9716 - DNA, 18 bp, synthetic construct
  source 1..18: mol_type = other DNA; mol_type = other DNA
cctgagggaaagtggagg

SEQ ID NO: 9717 - DNA, 18 bp, synthetic construct
  source 1..18: mol_type = other DNA; mol_type = other DNA
cctgagggaaaggtgagg

SEQ ID NO: 9718 - DNA, 18 bp, synthetic construct
  source 1..18: mol_type = other DNA; mol_type = other DNA
cctgagggaaagggtagg

SEQ ID NO: 9719 - DNA, 18 bp, synthetic construct
  source 1..18: mol_type = other DNA; mol_type = other DNA
acctgagggaaatgggag

SEQ ID NO: 9720 - DNA, 18 bp, synthetic construct
  source 1..18: mol_type = other DNA; mol_type = other DNA
acctgagggaaagtggag

SEQ ID NO: 9721 - DNA, 18 bp, synthetic construct
  source 1..18: mol_type = other DNA; mol_type = other DNA
acctgagggaaaggtgag

SEQ ID NO: 9722 - DNA, 18 bp, synthetic construct
  source 1..18: mol_type = other DNA; mol_type = other DNA
acctgagggaaagggtag

SEQ ID NO: 9723 - DNA, 18 bp, synthetic construct
  source 1..18: mol_type = other DNA; mol_type = other DNA
cacctgagggaaagggaa

SEQ ID NO: 9724 - DNA, 18 bp, synthetic construct
  source 1..18: mol_type = other DNA; mol_type = other DNA
ccacctgagggaaaggga

SEQ ID NO: 9725 - DNA, 18 bp, synthetic construct
  source 1..18: mol_type = other DNA; mol_type = other DNA
gccacctgagggaaaggg

SEQ ID NO: 9726 - DNA, 18 bp, synthetic construct
  source 1..18: mol_type = other DNA; mol_type = other DNA
gccacctgagggaaagga

SEQ ID NO: 9727 - DNA, 18 bp, synthetic construct
  source 1..18: mol_type = other DNA; mol_type = other DNA
ggccacctgagggaaagg

SEQ ID NO: 9728 - DNA, 18 bp, synthetic construct
  source 1..18: mol_type = other DNA; mol_type = other DNA
ggccacctgagggaaaga

SEQ ID NO: 9729 - DNA, 18 bp, synthetic construct
  source 1..18: mol_type = other DNA; mol_type = other DNA
tggccacctgagggaaag

SEQ ID NO: 9730 - DNA, 18 bp, synthetic construct
  source 1..18: mol_type = other DNA; mol_type = other DNA
tggccacctgagggaaaa

SEQ ID NO: 9731 - DNA, 18 bp, synthetic construct
  source 1..18: mol_type = other DNA; mol_type = other DNA
atggccacctgagggaaa

SEQ ID NO: 9732 - DNA, 18 bp, synthetic construct
  source 1..18: mol_type = other DNA; mol_type = other DNA
atggccacctgaggaaaa

SEQ ID NO: 9733 - DNA, 18 bp, synthetic construct
  source 1..18: mol_type = other DNA; mol_type = other DNA
gatggccacctgagggaa

SEQ ID NO: 9734 - DNA, 18 bp, synthetic construct
  source 1..18: mol_type = other DNA; mol_type = other DNA
gatggccacctgaggaaa

SEQ ID NO: 9735 - DNA, 18 bp, synthetic construct
  source 1..18: mol_type = other DNA; mol_type = other DNA
tgatggccacctgaggga

SEQ ID NO: 9736 - DNA, 18 bp, synthetic construct
  source 1..18: mol_type = other DNA; mol_type = other DNA
tgatggccacctgaggaa

SEQ ID NO: 9737 - DNA, 18 bp, synthetic construct
  source 1..18: mol_type = other DNA; mol_type = other DNA
atgatggccacctgaggg

SEQ ID NO: 9738 - DNA, 18 bp, synthetic construct
  source 1..18: mol_type = other DNA; mol_type = other DNA
atgatggccacctgagga

SEQ ID NO: 9739 - DNA, 18 bp, synthetic construct
  source 1..18: mol_type = other DNA; mol_type = other DNA
gatgatggccacctgagg

SEQ ID NO: 9740 - DNA, 18 bp, synthetic construct
  source 1..18: mol_type = other DNA; mol_type = other DNA
gatgatggccacctgaga

SEQ ID NO: 9741 - DNA, 18 bp, synthetic construct
  source 1..18: mol_type = other DNA; mol_type = other DNA
cgatgatggccacctgag

SEQ ID NO: 9742 - DNA, 18 bp, synthetic construct
  source 1..18: mol_type = other DNA; mol_type = other DNA
cgatgatggccacctgaa

SEQ ID NO: 9743 - DNA, 18 bp, synthetic construct
  source 1..18: mol_type = other DNA; mol_type = other DNA
gcgatgatggccacctga

SEQ ID NO: 9744 - DNA, 18 bp, synthetic construct
  source 1..18: mol_type = other DNA; mol_type = other DNA
gcgatgatggccacctaa

SEQ ID NO: 9745 - DNA, 18 bp, synthetic construct
  source 1..18: mol_type = other DNA; mol_type = other DNA
tgcgatgatggccacctg

SEQ ID NO: 9746 - DNA, 18 bp, synthetic construct
  source 1..18: mol_type = other DNA; mol_type = other DNA
tgcgatgatggccaccta

SEQ ID NO: 9747 - DNA, 18 bp, synthetic construct
  source 1..18: mol_type = other DNA; mol_type = other DNA
ctgcgatgatggccacct

SEQ ID NO: 9748 - DNA, 18 bp, synthetic construct
  source 1..18: mol_type = other DNA; mol_type = other DNA
ctgcgatgatgaccacct

SEQ ID NO: 9749 - DNA, 18 bp, synthetic construct
  source 1..18: mol_type = other DNA; mol_type = other DNA
cctgcgatgatggccacc

SEQ ID NO: 9750 - DNA, 18 bp, synthetic construct
  source 1..18: mol_type = other DNA; mol_type = other DNA
cctgcgatgatgaccacc

SEQ ID NO: 9751 - DNA, 18 bp, synthetic construct
  source 1..18: mol_type = other DNA; mol_type = other DNA
ccctgcgatgatggccac

SEQ ID NO: 9752 - DNA, 18 bp, synthetic construct
  source 1..18: mol_type = other DNA; mol_type = other DNA
ccctgcgatgatgaccac

SEQ ID NO: 9753 - DNA, 18 bp, synthetic construct
  source 1..18: mol_type = other DNA; mol_type = other DNA
tccctgcgatgatggcca

SEQ ID NO: 9754 - DNA, 18 bp, synthetic construct
  source 1..18: mol_type = other DNA; mol_type = other DNA
tccctgcgatgatgacca

SEQ ID NO: 9755 - DNA, 18 bp, synthetic construct
  source 1..18: mol_type = other DNA; mol_type = other DNA
ttccctgcgatgatggcc

SEQ ID NO: 9756 - DNA, 18 bp, synthetic construct
  source 1..18: mol_type = other DNA; mol_type = other DNA
ttccctgcgatgatgacc

SEQ ID NO: 9757 - DNA, 18 bp, synthetic construct
  source 1..18: mol_type = other DNA; mol_type = other DNA
gttccctgcgatgatggc

SEQ ID NO: 9758 - DNA, 18 bp, synthetic construct
  source 1..18: mol_type = other DNA; mol_type = other DNA
gttccctgcgatgatgac

SEQ ID NO: 9759 - DNA, 18 bp, synthetic construct
  source 1..18: mol_type = other DNA; mol_type = other DNA
agttccctgcgatgatgg

SEQ ID NO: 9760 - DNA, 18 bp, synthetic construct
  source 1..18: mol_type = other DNA; mol_type = other DNA
agttccctgcgatgatga

SEQ ID NO: 9761 - DNA, 18 bp, synthetic construct
  source 1..18: mol_type = other DNA; mol_type = other DNA
aagttccctgcgatgatg

SEQ ID NO: 9762 - DNA, 18 bp, synthetic construct
  source 1..18: mol_type = other DNA; mol_type = other DNA
aagttccctgcgatgata

SEQ ID NO: 9763 - DNA, 18 bp, synthetic construct
  source 1..18: mol_type = other DNA; mol_type = other DNA
aaagttccctgcgatgat

SEQ ID NO: 9764 - DNA, 18 bp, synthetic construct
  source 1..18: mol_type = other DNA; mol_type = other DNA
aaagttccctgcgataat

SEQ ID NO: 9765 - DNA, 18 bp, synthetic construct
  source 1..18: mol_type = other DNA; mol_type = other DNA
caaagttccctgcgatga

SEQ ID NO: 9766 - DNA, 18 bp, synthetic construct
  source 1..18: mol_type = other DNA; mol_type = other DNA
caaagttccctgcgataa

SEQ ID NO: 9767 - DNA, 18 bp, synthetic construct
  source 1..18: mol_type = other DNA; mol_type = other DNA
tcaaagttccctgcgatg

SEQ ID NO: 9768 - DNA, 18 bp, synthetic construct
  source 1..18: mol_type = other DNA; mol_type = other DNA
tcaaagttccctgcgata

SEQ ID NO: 9769 - DNA, 18 bp, synthetic construct
  source 1..18: mol_type = other DNA; mol_type = other DNA
ctcaaagttccctgcgat

SEQ ID NO: 9770 - DNA, 18 bp, synthetic construct
  source 1..18: mol_type = other DNA; mol_type = other DNA
ctcaaagttccctgcaat

SEQ ID NO: 9771 - DNA, 18 bp, synthetic construct
  source 1..18: mol_type = other DNA; mol_type = other DNA
gctcaaagttccctgcga

SEQ ID NO: 9772 - DNA, 18 bp, synthetic construct
  source 1..18: mol_type = other DNA; mol_type = other DNA
gctcaaagttccctgcaa

SEQ ID NO: 9773 - DNA, 18 bp, synthetic construct
  source 1..18: mol_type = other DNA; mol_type = other DNA
agctcaaagttccctgcg

SEQ ID NO: 9774 - DNA, 18 bp, synthetic construct
  source 1..18: mol_type = other DNA; mol_type = other DNA
agctcaaagttccctgca

SEQ ID NO: 9775 - DNA, 18 bp, synthetic construct
  source 1..18: mol_type = other DNA; mol_type = other DNA
aagctcaaagttccctgc

SEQ ID NO: 9776 - DNA, 18 bp, synthetic construct
  source 1..18: mol_type = other DNA; mol_type = other DNA
aagctcaaagttccctac

SEQ ID NO: 9777 - DNA, 18 bp, synthetic construct
  source 1..18: mol_type = other DNA; mol_type = other DNA
caagctcaaagttccctg

SEQ ID NO: 9778 - DNA, 18 bp, synthetic construct
  source 1..18: mol_type = other DNA; mol_type = other DNA
caagctcaaagttcccta

SEQ ID NO: 9779 - DNA, 18 bp, synthetic construct
  source 1..18: mol_type = other DNA; mol_type = other DNA
gcaagctcaaagttccct

SEQ ID NO: 9780 - DNA, 18 bp, synthetic construct
  source 1..18: mol_type = other DNA; mol_type = other DNA
gcaagctcaaaattccct

SEQ ID NO: 9781 - DNA, 18 bp, synthetic construct
  source 1..18: mol_type = other DNA; mol_type = other DNA
tgcaagctcaaagttccc

SEQ ID NO: 9782 - DNA, 18 bp, synthetic construct
  source 1..18: mol_type = other DNA; mol_type = other DNA
tgcaagctcaaaattccc

SEQ ID NO: 9783 - DNA, 18 bp, synthetic construct
  source 1..18: mol_type = other DNA; mol_type = other DNA
ctgcaagctcaaagttcc

SEQ ID NO: 9784 - DNA, 18 bp, synthetic construct
  source 1..18: mol_type = other DNA; mol_type = other DNA
ctgcaagctcaaaattcc

SEQ ID NO: 9785 - DNA, 18 bp, synthetic construct
  source 1..18: mol_type = other DNA; mol_type = other DNA
tctgcaagctcaaagttc

SEQ ID NO: 9786 - DNA, 18 bp, synthetic construct
  source 1..18: mol_type = other DNA; mol_type = other DNA
tctgcaagctcaaaattc

SEQ ID NO: 9787 - DNA, 18 bp, synthetic construct
  source 1..18: mol_type = other DNA; mol_type = other DNA
ctctgcaagctcaaagtt

SEQ ID NO: 9788 - DNA, 18 bp, synthetic construct
  source 1..18: mol_type = other DNA; mol_type = other DNA
ctctgcaagctcaaaatt

SEQ ID NO: 9789 - DNA, 18 bp, synthetic construct
  source 1..18: mol_type = other DNA; mol_type = other DNA
cctctgcaagctcaaagt

SEQ ID NO: 9790 - DNA, 18 bp, synthetic construct
  source 1..18: mol_type = other DNA; mol_type = other DNA
cctctgcaagctcaaaat

SEQ ID NO: 9791 - DNA, 18 bp, synthetic construct
  source 1..18: mol_type = other DNA; mol_type = other DNA
acctctgcaagctcaaag

SEQ ID NO: 9792 - DNA, 18 bp, synthetic construct
  source 1..18: mol_type = other DNA; mol_type = other DNA
acctctgcaagctcaaaa

SEQ ID NO: 9793 - DNA, 18 bp, synthetic construct
  source 1..18: mol_type = other DNA; mol_type = other DNA
aacctctgcaagctcaaa

SEQ ID NO: 9794 - DNA, 18 bp, synthetic construct
  source 1..18: mol_type = other DNA; mol_type = other DNA
aacctctgcaaactcaaa

SEQ ID NO: 9795 - DNA, 18 bp, synthetic construct
  source 1..18: mol_type = other DNA; mol_type = other DNA
taacctctgcaagctcaa

SEQ ID NO: 9796 - DNA, 18 bp, synthetic construct
  source 1..18: mol_type = other DNA; mol_type = other DNA
taacctctgcaaactcaa

SEQ ID NO: 9797 - DNA, 18 bp, synthetic construct
  source 1..18: mol_type = other DNA; mol_type = other DNA
ataacctctgcaagctca

SEQ ID NO: 9798 - DNA, 18 bp, synthetic construct
  source 1..18: mol_type = other DNA; mol_type = other DNA
ataacctctgcaaactca

SEQ ID NO: 9799 - DNA, 18 bp, synthetic construct
  source 1..18: mol_type = other DNA; mol_type = other DNA
gataacctctgcaagctc

SEQ ID NO: 9800 - DNA, 18 bp, synthetic construct
  source 1..18: mol_type = other DNA; mol_type = other DNA
gataacctctgcaaactc

SEQ ID NO: 9801 - DNA, 18 bp, synthetic construct
  source 1..18: mol_type = other DNA; mol_type = other DNA
tgataacctctgcaagct

SEQ ID NO: 9802 - DNA, 18 bp, synthetic construct
  source 1..18: mol_type = other DNA; mol_type = other DNA
tgataacctctgcaaact

SEQ ID NO: 9803 - DNA, 18 bp, synthetic construct
  source 1..18: mol_type = other DNA; mol_type = other DNA
ttgataacctctgcaagc

SEQ ID NO: 9804 - DNA, 18 bp, synthetic construct
  source 1..18: mol_type = other DNA; mol_type = other DNA
ttgataacctctgcaaac

SEQ ID NO: 9805 - DNA, 18 bp, synthetic construct
  source 1..18: mol_type = other DNA; mol_type = other DNA
cttgataacctctgcaag

SEQ ID NO: 9806 - DNA, 18 bp, synthetic construct
  source 1..18: mol_type = other DNA; mol_type = other DNA
cttgataacctctgcaaa

SEQ ID NO: 9807 - DNA, 18 bp, synthetic construct
  source 1..18: mol_type = other DNA; mol_type = other DNA
tcttgataacctctgcaa

SEQ ID NO: 9808 - DNA, 18 bp, synthetic construct
  source 1..18: mol_type = other DNA; mol_type = other DNA
tcttgataacctctacaa

SEQ ID NO: 9809 - DNA, 18 bp, synthetic construct
  source 1..18: mol_type = other DNA; mol_type = other DNA
gtcttgataacctctgca

SEQ ID NO: 9810 - DNA, 18 bp, synthetic construct
  source 1..18: mol_type = other DNA; mol_type = other DNA
gtcttgataacctctaca

SEQ ID NO: 9811 - DNA, 18 bp, synthetic construct
  source 1..18: mol_type = other DNA; mol_type = other DNA
ggtcttgataacctctgc

SEQ ID NO: 9812 - DNA, 18 bp, synthetic construct
  source 1..18: mol_type = other DNA; mol_type = other DNA
ggtcttgataacctctac

SEQ ID NO: 9813 - DNA, 18 bp, synthetic construct
  source 1..18: mol_type = other DNA; mol_type = other DNA
gggtcttgataacctctg

SEQ ID NO: 9814 - DNA, 18 bp, synthetic construct
  source 1..18: mol_type = other DNA; mol_type = other DNA
gggtcttgataacctcta

SEQ ID NO: 9815 - DNA, 18 bp, synthetic construct
  source 1..18: mol_type = other DNA; mol_type = other DNA
tgggtcttgataacctct

SEQ ID NO: 9816 - DNA, 18 bp, synthetic construct
  source 1..18: mol_type = other DNA; mol_type = other DNA
tgggtcttaataacctct

SEQ ID NO: 9817 - DNA, 18 bp, synthetic construct
  source 1..18: mol_type = other DNA; mol_type = other DNA
gtgggtcttgataacctc

SEQ ID NO: 9818 - DNA, 18 bp, synthetic construct
  source 1..18: mol_type = other DNA; mol_type = other DNA
gtgggtcttaataacctc

SEQ ID NO: 9819 - DNA, 18 bp, synthetic construct
  source 1..18: mol_type = other DNA; mol_type = other DNA
tgtgggtcttgataacct

SEQ ID NO: 9820 - DNA, 18 bp, synthetic construct
  source 1..18: mol_type = other DNA; mol_type = other DNA
tgtgggtcttaataacct

SEQ ID NO: 9821 - DNA, 18 bp, synthetic construct
  source 1..18: mol_type = other DNA; mol_type = other DNA
ttgtgggtcttgataacc

SEQ ID NO: 9822 - DNA, 18 bp, synthetic construct
  source 1..18: mol_type = other DNA; mol_type = other DNA
ttgtgggtcttaataacc

SEQ ID NO: 9823 - DNA, 18 bp, synthetic construct
  source 1..18: mol_type = other DNA; mol_type = other DNA
tttgtgggtcttgataac

SEQ ID NO: 9824 - DNA, 18 bp, synthetic construct
  source 1..18: mol_type = other DNA; mol_type = other DNA
tttgtgggtcttaataac

SEQ ID NO: 9825 - DNA, 18 bp, synthetic construct
  source 1..18: mol_type = other DNA; mol_type = other DNA
ctttgtgggtcttgataa

SEQ ID NO: 9826 - DNA, 18 bp, synthetic construct
  source 1..18: mol_type = other DNA; mol_type = other DNA
ctttgtgggtcttaataa

SEQ ID NO: 9827 - DNA, 18 bp, synthetic construct
  source 1..18: mol_type = other DNA; mol_type = other DNA
tctttgtgggtcttgata

SEQ ID NO: 9828 - DNA, 18 bp, synthetic construct
  source 1..18: mol_type = other DNA; mol_type = other DNA
tctttgtgggtcttaata

SEQ ID NO: 9829 - DNA, 18 bp, synthetic construct
  source 1..18: mol_type = other DNA; mol_type = other DNA
gtctttgtgggtcttgat

SEQ ID NO: 9830 - DNA, 18 bp, synthetic construct
  source 1..18: mol_type = other DNA; mol_type = other DNA
gtctttgtgggtcttaat

SEQ ID NO: 9831 - DNA, 18 bp, synthetic construct
  source 1..18: mol_type = other DNA; mol_type = other DNA
agtctttgtgggtcttga

SEQ ID NO: 9832 - DNA, 18 bp, synthetic construct
  source 1..18: mol_type = other DNA; mol_type = other DNA
agtctttgtgggtcttaa

SEQ ID NO: 9833 - DNA, 18 bp, synthetic construct
  source 1..18: mol_type = other DNA; mol_type = other DNA
gagtctttgtgggtcttg

SEQ ID NO: 9834 - DNA, 18 bp, synthetic construct
  source 1..18: mol_type = other DNA; mol_type = other DNA
gagtctttgtgggtctta

SEQ ID NO: 9835 - DNA, 18 bp, synthetic construct
  source 1..18: mol_type = other DNA; mol_type = other DNA
cgagtctttgtgggtctt

SEQ ID NO: 9836 - DNA, 18 bp, synthetic construct
  source 1..18: mol_type = other DNA; mol_type = other DNA
cgagtctttgtggatctt

SEQ ID NO: 9837 - DNA, 18 bp, synthetic construct
  source 1..18: mol_type = other DNA; mol_type = other DNA
ccgagtctttgtgggtct

SEQ ID NO: 9838 - DNA, 18 bp, synthetic construct
  source 1..18: mol_type = other DNA; mol_type = other DNA
ccgagtctttgtggatct

SEQ ID NO: 9839 - DNA, 18 bp, synthetic construct
  source 1..18: mol_type = other DNA; mol_type = other DNA
tccgagtctttgtgggtc

SEQ ID NO: 9840 - DNA, 18 bp, synthetic construct
  source 1..18: mol_type = other DNA; mol_type = other DNA
tccgagtctttgtggatc

SEQ ID NO: 9841 - DNA, 18 bp, synthetic construct
  source 1..18: mol_type = other DNA; mol_type = other DNA
atccgagtctttgtgggt

SEQ ID NO: 9842 - DNA, 18 bp, synthetic construct
  source 1..18: mol_type = other DNA; mol_type = other DNA
atccgagtctttgtggat

SEQ ID NO: 9843 - DNA, 18 bp, synthetic construct
  source 1..18: mol_type = other DNA; mol_type = other DNA
catccgagtctttgtggg

SEQ ID NO: 9844 - DNA, 18 bp, synthetic construct
  source 1..18: mol_type = other DNA; mol_type = other DNA
catccgagtctttgtgga

SEQ ID NO: 9845 - DNA, 18 bp, synthetic construct
  source 1..18: mol_type = other DNA; mol_type = other DNA
acatccgagtctttgtgg

SEQ ID NO: 9846 - DNA, 18 bp, synthetic construct
  source 1..18: mol_type = other DNA; mol_type = other DNA
acatccgagtctttgtga

SEQ ID NO: 9847 - DNA, 18 bp, synthetic construct
  source 1..18: mol_type = other DNA; mol_type = other DNA
aacatccgagtctttgtg

SEQ ID NO: 9848 - DNA, 18 bp, synthetic construct
  source 1..18: mol_type = other DNA; mol_type = other DNA
aacatccgagtctttgta

SEQ ID NO: 9849 - DNA, 18 bp, synthetic construct
  source 1..18: mol_type = other DNA; mol_type = other DNA
caacatccgagtctttgt

SEQ ID NO: 9850 - DNA, 18 bp, synthetic construct
  source 1..18: mol_type = other DNA; mol_type = other DNA
caacatccgagtctttat

SEQ ID NO: 9851 - DNA, 18 bp, synthetic construct
  source 1..18: mol_type = other DNA; mol_type = other DNA
gccacccccgccactcac

SEQ ID NO: 9852 - DNA, 18 bp, synthetic construct
  source 1..18: mol_type = other DNA; mol_type = other DNA
gccacccccaccactcac

SEQ ID NO: 9853 - DNA, 18 bp, synthetic construct
  source 1..18: mol_type = other DNA; mol_type = other DNA
cgccacccccgccactca

SEQ ID NO: 9854 - DNA, 18 bp, synthetic construct
  source 1..18: mol_type = other DNA; mol_type = other DNA
cgccacccccaccactca

SEQ ID NO: 9855 - DNA, 18 bp, synthetic construct
  source 1..18: mol_type = other DNA; mol_type = other DNA
ccgccacccccgccactc

SEQ ID NO: 9856 - DNA, 18 bp, synthetic construct
  source 1..18: mol_type = other DNA; mol_type = other DNA
ccgccacccccaccactc

SEQ ID NO: 9857 - DNA, 18 bp, synthetic construct
  source 1..18: mol_type = other DNA; mol_type = other DNA
accgccacccccgccact

SEQ ID NO: 9858 - DNA, 18 bp, synthetic construct
  source 1..18: mol_type = other DNA; mol_type = other DNA
accgccacccccaccact

SEQ ID NO: 9859 - DNA, 18 bp, synthetic construct
  source 1..18: mol_type = other DNA; mol_type = other DNA
caccgccacccccgccac

SEQ ID NO: 9860 - DNA, 18 bp, synthetic construct
  source 1..18: mol_type = other DNA; mol_type = other DNA
caccgccacccccaccac

SEQ ID NO: 9861 - DNA, 18 bp, synthetic construct
  source 1..18: mol_type = other DNA; mol_type = other DNA
ccaccgccacccccgcca

SEQ ID NO: 9862 - DNA, 18 bp, synthetic construct
  source 1..18: mol_type = other DNA; mol_type = other DNA
ccaccgccacccccacca

SEQ ID NO: 9863 - DNA, 18 bp, synthetic construct
  source 1..18: mol_type = other DNA; mol_type = other DNA
tccaccgccacccccgcc

SEQ ID NO: 9864 - DNA, 18 bp, synthetic construct
  source 1..18: mol_type = other DNA; mol_type = other DNA
tccaccgccacccccacc

SEQ ID NO: 9865 - DNA, 18 bp, synthetic construct
  source 1..18: mol_type = other DNA; mol_type = other DNA
ctccaccgccacccccgc

SEQ ID NO: 9866 - DNA, 18 bp, synthetic construct
  source 1..18: mol_type = other DNA; mol_type = other DNA
ctccaccgccacccccac

SEQ ID NO: 9867 - DNA, 18 bp, synthetic construct
  source 1..18: mol_type = other DNA; mol_type = other DNA
cctccaccgccacccccg

SEQ ID NO: 9868 - DNA, 18 bp, synthetic construct
  source 1..18: mol_type = other DNA; mol_type = other DNA
cctccaccgccaccccca

SEQ ID NO: 9869 - DNA, 18 bp, synthetic construct
  source 1..18: mol_type = other DNA; mol_type = other DNA
acctccaccgccaccccc

SEQ ID NO: 9870 - DNA, 18 bp, synthetic construct
  source 1..18: mol_type = other DNA; mol_type = other DNA
acctccaccaccaccccc

SEQ ID NO: 9871 - DNA, 18 bp, synthetic construct
  source 1..18: mol_type = other DNA; mol_type = other DNA
cacctccaccgccacccc

SEQ ID NO: 9872 - DNA, 18 bp, synthetic construct
  source 1..18: mol_type = other DNA; mol_type = other DNA
cacctccaccaccacccc

SEQ ID NO: 9873 - DNA, 18 bp, synthetic construct
  source 1..18: mol_type = other DNA; mol_type = other DNA
ccacctccaccgccaccc

SEQ ID NO: 9874 - DNA, 18 bp, synthetic construct
  source 1..18: mol_type = other DNA; mol_type = other DNA
ccacctccaccaccaccc

SEQ ID NO: 9875 - DNA, 18 bp, synthetic construct
  source 1..18: mol_type = other DNA; mol_type = other DNA
tccacctccaccgccacc

SEQ ID NO: 9876 - DNA, 18 bp, synthetic construct
  source 1..18: mol_type = other DNA; mol_type = other DNA
tccacctccaccaccacc

SEQ ID NO: 9877 - DNA, 18 bp, synthetic construct
  source 1..18: mol_type = other DNA; mol_type = other DNA
gtccacctccaccgccac

SEQ ID NO: 9878 - DNA, 18 bp, synthetic construct
  source 1..18: mol_type = other DNA; mol_type = other DNA
gtccacctccaccaccac

SEQ ID NO: 9879 - DNA, 18 bp, synthetic construct
  source 1..18: mol_type = other DNA; mol_type = other DNA
cgtccacctccaccgcca

SEQ ID NO: 9880 - DNA, 18 bp, synthetic construct
  source 1..18: mol_type = other DNA; mol_type = other DNA
cgtccacctccaccacca

SEQ ID NO: 9881 - DNA, 18 bp, synthetic construct
  source 1..18: mol_type = other DNA; mol_type = other DNA
gcgtccacctccaccgcc

SEQ ID NO: 9882 - DNA, 18 bp, synthetic construct
  source 1..18: mol_type = other DNA; mol_type = other DNA
gcgtccacctccaccacc

SEQ ID NO: 9883 - DNA, 18 bp, synthetic construct
  source 1..18: mol_type = other DNA; mol_type = other DNA
tgcgtccacctccaccgc

SEQ ID NO: 9884 - DNA, 18 bp, synthetic construct
  source 1..18: mol_type = other DNA; mol_type = other DNA
tgcgtccacctccaccac

SEQ ID NO: 9885 - DNA, 18 bp, synthetic construct
  source 1..18: mol_type = other DNA; mol_type = other DNA
ctgcgtccacctccaccg

SEQ ID NO: 9886 - DNA, 18 bp, synthetic construct
  source 1..18: mol_type = other DNA; mol_type = other DNA
ctgcgtccacctccacca

SEQ ID NO: 9887 - DNA, 18 bp, synthetic construct
  source 1..18: mol_type = other DNA; mol_type = other DNA
cctgcgtccacctccacc

SEQ ID NO: 9888 - DNA, 18 bp, synthetic construct
  source 1..18: mol_type = other DNA; mol_type = other DNA
cctgcatccacctccacc

SEQ ID NO: 9889 - DNA, 18 bp, synthetic construct
  source 1..18: mol_type = other DNA; mol_type = other DNA
acctgcgtccacctccac

SEQ ID NO: 9890 - DNA, 18 bp, synthetic construct
  source 1..18: mol_type = other DNA; mol_type = other DNA
acctgcatccacctccac

SEQ ID NO: 9891 - DNA, 18 bp, synthetic construct
  source 1..18: mol_type = other DNA; mol_type = other DNA
cacctgcgtccacctcca

SEQ ID NO: 9892 - DNA, 18 bp, synthetic construct
  source 1..18: mol_type = other DNA; mol_type = other DNA
cacctgcatccacctcca

SEQ ID NO: 9893 - DNA, 18 bp, synthetic construct
  source 1..18: mol_type = other DNA; mol_type = other DNA
ccacctgcgtccacctcc

SEQ ID NO: 9894 - DNA, 18 bp, synthetic construct
  source 1..18: mol_type = other DNA; mol_type = other DNA
ccacctgcatccacctcc

SEQ ID NO: 9895 - DNA, 18 bp, synthetic construct
  source 1..18: mol_type = other DNA; mol_type = other DNA
tccacctgcgtccacctc

SEQ ID NO: 9896 - DNA, 18 bp, synthetic construct
  source 1..18: mol_type = other DNA; mol_type = other DNA
tccacctgcatccacctc

SEQ ID NO: 9897 - DNA, 18 bp, synthetic construct
  source 1..18: mol_type = other DNA; mol_type = other DNA
gtccacctgcgtccacct

SEQ ID NO: 9898 - DNA, 18 bp, synthetic construct
  source 1..18: mol_type = other DNA; mol_type = other DNA
gtccacctgcatccacct

SEQ ID NO: 9899 - DNA, 18 bp, synthetic construct
  source 1..18: mol_type = other DNA; mol_type = other DNA
cgtccacctgcgtccacc

SEQ ID NO: 9900 - DNA, 18 bp, synthetic construct
  source 1..18: mol_type = other DNA; mol_type = other DNA
cgtccacctgcatccacc

SEQ ID NO: 9901 - DNA, 18 bp, synthetic construct
  source 1..18: mol_type = other DNA; mol_type = other DNA
ccgtccacctgcgtccac

SEQ ID NO: 9902 - DNA, 18 bp, synthetic construct
  source 1..18: mol_type = other DNA; mol_type = other DNA
ccgtccacctgcatccac

SEQ ID NO: 9903 - DNA, 18 bp, synthetic construct
  source 1..18: mol_type = other DNA; mol_type = other DNA
accgtccacctgcgtcca

SEQ ID NO: 9904 - DNA, 18 bp, synthetic construct
  source 1..18: mol_type = other DNA; mol_type = other DNA
accgtccacctgcatcca

SEQ ID NO: 9905 - DNA, 18 bp, synthetic construct
  source 1..18: mol_type = other DNA; mol_type = other DNA
gaccgtccacctgcgtcc

SEQ ID NO: 9906 - DNA, 18 bp, synthetic construct
  source 1..18: mol_type = other DNA; mol_type = other DNA
gaccgtccacctgcatcc

SEQ ID NO: 9907 - DNA, 18 bp, synthetic construct
  source 1..18: mol_type = other DNA; mol_type = other DNA
ggaccgtccacctgcgtc

SEQ ID NO: 9908 - DNA, 18 bp, synthetic construct
  source 1..18: mol_type = other DNA; mol_type = other DNA
ggaccgtccacctgcatc

SEQ ID NO: 9909 - DNA, 18 bp, synthetic construct
  source 1..18: mol_type = other DNA; mol_type = other DNA
tggaccgtccacctgcgt

SEQ ID NO: 9910 - DNA, 18 bp, synthetic construct
  source 1..18: mol_type = other DNA; mol_type = other DNA
tggaccgtccacctgcat

SEQ ID NO: 9911 - DNA, 18 bp, synthetic construct
  source 1..18: mol_type = other DNA; mol_type = other DNA
atggaccgtccacctgcg

SEQ ID NO: 9912 - DNA, 18 bp, synthetic construct
  source 1..18: mol_type = other DNA; mol_type = other DNA
atggaccgtccacctgca

SEQ ID NO: 9913 - DNA, 18 bp, synthetic construct
  source 1..18: mol_type = other DNA; mol_type = other DNA
catggaccgtccacctgc

SEQ ID NO: 9914 - DNA, 18 bp, synthetic construct
  source 1..18: mol_type = other DNA; mol_type = other DNA
catggaccgtccacctac

SEQ ID NO: 9915 - DNA, 18 bp, synthetic construct
  source 1..18: mol_type = other DNA; mol_type = other DNA
tcatggaccgtccacctg

SEQ ID NO: 9916 - DNA, 18 bp, synthetic construct
  source 1..18: mol_type = other DNA; mol_type = other DNA
tcatggaccgtccaccta

SEQ ID NO: 9917 - DNA, 18 bp, synthetic construct
  source 1..18: mol_type = other DNA; mol_type = other DNA
atcatggaccgtccacct

SEQ ID NO: 9918 - DNA, 18 bp, synthetic construct
  source 1..18: mol_type = other DNA; mol_type = other DNA
atcatggaccatccacct

SEQ ID NO: 9919 - DNA, 18 bp, synthetic construct
  source 1..18: mol_type = other DNA; mol_type = other DNA
catcatggaccgtccacc

SEQ ID NO: 9920 - DNA, 18 bp, synthetic construct
  source 1..18: mol_type = other DNA; mol_type = other DNA
catcatggaccatccacc

SEQ ID NO: 9921 - DNA, 18 bp, synthetic construct
  source 1..18: mol_type = other DNA; mol_type = other DNA
ccatcatggaccgtccac

SEQ ID NO: 9922 - DNA, 18 bp, synthetic construct
  source 1..18: mol_type = other DNA; mol_type = other DNA
ccatcatggaccatccac

SEQ ID NO: 9923 - DNA, 18 bp, synthetic construct
  source 1..18: mol_type = other DNA; mol_type = other DNA
cccatcatggaccgtcca

SEQ ID NO: 9924 - DNA, 18 bp, synthetic construct
  source 1..18: mol_type = other DNA; mol_type = other DNA
cccatcatggaccatcca

SEQ ID NO: 9925 - DNA, 18 bp, synthetic construct
  source 1..18: mol_type = other DNA; mol_type = other DNA
gcccatcatggaccgtcc

SEQ ID NO: 9926 - DNA, 18 bp, synthetic construct
  source 1..18: mol_type = other DNA; mol_type = other DNA
gcccatcatggaccatcc

SEQ ID NO: 9927 - DNA, 18 bp, synthetic construct
  source 1..18: mol_type = other DNA; mol_type = other DNA
tgcccatcatggaccgtc

SEQ ID NO: 9928 - DNA, 18 bp, synthetic construct
  source 1..18: mol_type = other DNA; mol_type = other DNA
tgcccatcatggaccatc

SEQ ID NO: 9929 - DNA, 18 bp, synthetic construct
  source 1..18: mol_type = other DNA; mol_type = other DNA
ctgcccatcatggaccgt

SEQ ID NO: 9930 - DNA, 18 bp, synthetic construct
  source 1..18: mol_type = other DNA; mol_type = other DNA
ctgcccatcatggaccat

SEQ ID NO: 9931 - DNA, 18 bp, synthetic construct
  source 1..18: mol_type = other DNA; mol_type = other DNA
tctgcccatcatggaccg

SEQ ID NO: 9932 - DNA, 18 bp, synthetic construct
  source 1..18: mol_type = other DNA; mol_type = other DNA
tctgcccatcatggacca

SEQ ID NO: 9933 - DNA, 18 bp, synthetic construct
  source 1..18: mol_type = other DNA; mol_type = other DNA
gtctgcccatcatggacc

SEQ ID NO: 9934 - DNA, 18 bp, synthetic construct
  source 1..18: mol_type = other DNA; mol_type = other DNA
gtctgcccatcatgaacc

SEQ ID NO: 9935 - DNA, 18 bp, synthetic construct
  source 1..18: mol_type = other DNA; mol_type = other DNA
tgtctgcccatcatggac

SEQ ID NO: 9936 - DNA, 18 bp, synthetic construct
  source 1..18: mol_type = other DNA; mol_type = other DNA
tgtctgcccatcatgaac

SEQ ID NO: 9937 - DNA, 18 bp, synthetic construct
  source 1..18: mol_type = other DNA; mol_type = other DNA
ctgtctgcccatcatgga

SEQ ID NO: 9938 - DNA, 18 bp, synthetic construct
  source 1..18: mol_type = other DNA; mol_type = other DNA
ctgtctgcccatcatgaa

SEQ ID NO: 9939 - DNA, 18 bp, synthetic construct
  source 1..18: mol_type = other DNA; mol_type = other DNA
cctgtctgcccatcatgg

SEQ ID NO: 9940 - DNA, 18 bp, synthetic construct
  source 1..18: mol_type = other DNA; mol_type = other DNA
cctgtctgcccatcatga

SEQ ID NO: 9941 - DNA, 18 bp, synthetic construct
  source 1..18: mol_type = other DNA; mol_type = other DNA
ccctgtctgcccatcatg

SEQ ID NO: 9942 - DNA, 18 bp, synthetic construct
  source 1..18: mol_type = other DNA; mol_type = other DNA
ccctgtctgcccatcata

SEQ ID NO: 9943 - DNA, 18 bp, synthetic construct
  source 1..18: mol_type = other DNA; mol_type = other DNA
gccctgtctgcccatcat

SEQ ID NO: 9944 - DNA, 18 bp, synthetic construct
  source 1..18: mol_type = other DNA; mol_type = other DNA
gccctgtctacccatcat

SEQ ID NO: 9945 - DNA, 18 bp, synthetic construct
  source 1..18: mol_type = other DNA; mol_type = other DNA
ggccctgtctgcccatca

SEQ ID NO: 9946 - DNA, 18 bp, synthetic construct
  source 1..18: mol_type = other DNA; mol_type = other DNA
ggccctgtctacccatca

SEQ ID NO: 9947 - DNA, 18 bp, synthetic construct
  source 1..18: mol_type = other DNA; mol_type = other DNA
cggccctgtctgcccatc

SEQ ID NO: 9948 - DNA, 18 bp, synthetic construct
  source 1..18: mol_type = other DNA; mol_type = other DNA
cggccctgtctacccatc

SEQ ID NO: 9949 - DNA, 18 bp, synthetic construct
  source 1..18: mol_type = other DNA; mol_type = other DNA
ccggccctgtctgcccat

SEQ ID NO: 9950 - DNA, 18 bp, synthetic construct
  source 1..18: mol_type = other DNA; mol_type = other DNA
ccggccctgtctacccat

SEQ ID NO: 9951 - DNA, 18 bp, synthetic construct
  source 1..18: mol_type = other DNA; mol_type = other DNA
cccggccctgtctgccca

SEQ ID NO: 9952 - DNA, 18 bp, synthetic construct
  source 1..18: mol_type = other DNA; mol_type = other DNA
cccggccctgtctaccca

SEQ ID NO: 9953 - DNA, 18 bp, synthetic construct
  source 1..18: mol_type = other DNA; mol_type = other DNA
tcccggccctgtctgccc

SEQ ID NO: 9954 - DNA, 18 bp, synthetic construct
  source 1..18: mol_type = other DNA; mol_type = other DNA
tcccggccctgtctaccc

SEQ ID NO: 9955 - DNA, 18 bp, synthetic construct
  source 1..18: mol_type = other DNA; mol_type = other DNA
ctcccggccctgtctgcc

SEQ ID NO: 9956 - DNA, 18 bp, synthetic construct
  source 1..18: mol_type = other DNA; mol_type = other DNA
ctcccggccctgtctacc

SEQ ID NO: 9957 - DNA, 18 bp, synthetic construct
  source 1..18: mol_type = other DNA; mol_type = other DNA
tctcccggccctgtctgc

SEQ ID NO: 9958 - DNA, 18 bp, synthetic construct
  source 1..18: mol_type = other DNA; mol_type = other DNA
tctcccggccctgtctac

SEQ ID NO: 9959 - DNA, 18 bp, synthetic construct
  source 1..18: mol_type = other DNA; mol_type = other DNA
gtctcccggccctgtctg

SEQ ID NO: 9960 - DNA, 18 bp, synthetic construct
  source 1..18: mol_type = other DNA; mol_type = other DNA
gtctcccggccctgtcta

SEQ ID NO: 9961 - DNA, 18 bp, synthetic construct
  source 1..18: mol_type = other DNA; mol_type = other DNA
tgtctcccggccctgtct

SEQ ID NO: 9962 - DNA, 18 bp, synthetic construct
  source 1..18: mol_type = other DNA; mol_type = other DNA
tgtctcccggccctatct

SEQ ID NO: 9963 - DNA, 18 bp, synthetic construct
  source 1..18: mol_type = other DNA; mol_type = other DNA
gtgtctcccggccctgtc

SEQ ID NO: 9964 - DNA, 18 bp, synthetic construct
  source 1..18: mol_type = other DNA; mol_type = other DNA
gtgtctcccggccctatc

SEQ ID NO: 9965 - DNA, 18 bp, synthetic construct
  source 1..18: mol_type = other DNA; mol_type = other DNA
tgtgtctcccggccctgt

SEQ ID NO: 9966 - DNA, 18 bp, synthetic construct
  source 1..18: mol_type = other DNA; mol_type = other DNA
tgtgtctcccggccctat

SEQ ID NO: 9967 - DNA, 18 bp, synthetic construct
  source 1..18: mol_type = other DNA; mol_type = other DNA
ctgtgtctcccggccctg

SEQ ID NO: 9968 - DNA, 18 bp, synthetic construct
  source 1..18: mol_type = other DNA; mol_type = other DNA
ctgtgtctcccggcccta

SEQ ID NO: 9969 - DNA, 18 bp, synthetic construct
  source 1..18: mol_type = other DNA; mol_type = other DNA
cctgtgtctcccggccct

SEQ ID NO: 9970 - DNA, 18 bp, synthetic construct
  source 1..18: mol_type = other DNA; mol_type = other DNA
cctgtgtctcccgaccct

SEQ ID NO: 9971 - DNA, 18 bp, synthetic construct
  source 1..18: mol_type = other DNA; mol_type = other DNA
acctgtgtctcccggccc

SEQ ID NO: 9972 - DNA, 18 bp, synthetic construct
  source 1..18: mol_type = other DNA; mol_type = other DNA
acctgtgtctcccgaccc

SEQ ID NO: 9973 - DNA, 18 bp, synthetic construct
  source 1..18: mol_type = other DNA; mol_type = other DNA
cacctgtgtctcccggcc

SEQ ID NO: 9974 - DNA, 18 bp, synthetic construct
  source 1..18: mol_type = other DNA; mol_type = other DNA
cacctgtgtctcccgacc

SEQ ID NO: 9975 - DNA, 18 bp, synthetic construct
  source 1..18: mol_type = other DNA; mol_type = other DNA
ccacctgtgtctcccggc

SEQ ID NO: 9976 - DNA, 18 bp, synthetic construct
  source 1..18: mol_type = other DNA; mol_type = other DNA
ccacctgtgtctcccgac

SEQ ID NO: 9977 - DNA, 18 bp, synthetic construct
  source 1..18: mol_type = other DNA; mol_type = other DNA
accacctgtgtctcccgg

SEQ ID NO: 9978 - DNA, 18 bp, synthetic construct
  source 1..18: mol_type = other DNA; mol_type = other DNA
accacctgtgtctcccga

SEQ ID NO: 9979 - DNA, 18 bp, synthetic construct
  source 1..18: mol_type = other DNA; mol_type = other DNA
taccacctgtgtctcccg

SEQ ID NO: 9980 - DNA, 18 bp, synthetic construct
  source 1..18: mol_type = other DNA; mol_type = other DNA
taccacctgtgtctccca

SEQ ID NO: 9981 - DNA, 18 bp, synthetic construct
  source 1..18: mol_type = other DNA; mol_type = other DNA
gtaccacctgtgtctccc

SEQ ID NO: 9982 - DNA, 18 bp, synthetic construct
  source 1..18: mol_type = other DNA; mol_type = other DNA
gtaccacctgtatctccc

SEQ ID NO: 9983 - DNA, 18 bp, synthetic construct
  source 1..18: mol_type = other DNA; mol_type = other DNA
cgtaccacctgtgtctcc

SEQ ID NO: 9984 - DNA, 18 bp, synthetic construct
  source 1..18: mol_type = other DNA; mol_type = other DNA
cgtaccacctgtatctcc

SEQ ID NO: 9985 - DNA, 18 bp, synthetic construct
  source 1..18: mol_type = other DNA; mol_type = other DNA
ccgtaccacctgtgtctc

SEQ ID NO: 9986 - DNA, 18 bp, synthetic construct
  source 1..18: mol_type = other DNA; mol_type = other DNA
ccgtaccacctgtatctc

SEQ ID NO: 9987 - DNA, 18 bp, synthetic construct
  source 1..18: mol_type = other DNA; mol_type = other DNA
cccgtaccacctgtgtct

SEQ ID NO: 9988 - DNA, 18 bp, synthetic construct
  source 1..18: mol_type = other DNA; mol_type = other DNA
cccgtaccacctgtatct

SEQ ID NO: 9989 - DNA, 18 bp, synthetic construct
  source 1..18: mol_type = other DNA; mol_type = other DNA
tcccgtaccacctgtgtc

SEQ ID NO: 9990 - DNA, 18 bp, synthetic construct
  source 1..18: mol_type = other DNA; mol_type = other DNA
tcccgtaccacctgtatc

SEQ ID NO: 9991 - DNA, 18 bp, synthetic construct
  source 1..18: mol_type = other DNA; mol_type = other DNA
ctcccgtaccacctgtgt

SEQ ID NO: 9992 - DNA, 18 bp, synthetic construct
  source 1..18: mol_type = other DNA; mol_type = other DNA
ctcccgtaccacctgtat

SEQ ID NO: 9993 - DNA, 18 bp, synthetic construct
  source 1..18: mol_type = other DNA; mol_type = other DNA
cctcccgtaccacctgtg

SEQ ID NO: 9994 - DNA, 18 bp, synthetic construct
  source 1..18: mol_type = other DNA; mol_type = other DNA
cctcccgtaccacctgta

SEQ ID NO: 9995 - DNA, 18 bp, synthetic construct
  source 1..18: mol_type = other DNA; mol_type = other DNA
ccctcccgtaccacctgt

SEQ ID NO: 9996 - DNA, 18 bp, synthetic construct
  source 1..18: mol_type = other DNA; mol_type = other DNA
ccctcccgtaccacctat

SEQ ID NO: 9997 - DNA, 18 bp, synthetic construct
  source 1..18: mol_type = other DNA; mol_type = other DNA
gccctcccgtaccacctg

SEQ ID NO: 9998 - DNA, 18 bp, synthetic construct
  source 1..18: mol_type = other DNA; mol_type = other DNA
gccctcccgtaccaccta

SEQ ID NO: 9999 - DNA, 18 bp, synthetic construct
  source 1..18: mol_type = other DNA; mol_type = other DNA
tgccctcccgtaccacct

SEQ ID NO: 10000 - DNA, 18 bp, synthetic construct
  source 1..18: mol_type = other DNA; mol_type = other DNA
tgccctcccataccacct

SEQ ID NO: 10001 - DNA, 18 bp, synthetic construct
  source 1..18: mol_type = other DNA; mol_type = other DNA
ctgccctcccgtaccacc

SEQ ID NO: 10002 - DNA, 18 bp, synthetic construct
  source 1..18: mol_type = other DNA; mol_type = other DNA
ctgccctcccataccacc

SEQ ID NO: 10003 - DNA, 18 bp, synthetic construct
  source 1..18: mol_type = other DNA; mol_type = other DNA
cctgccctcccgtaccac

SEQ ID NO: 10004 - DNA, 18 bp, synthetic construct
  source 1..18: mol_type = other DNA; mol_type = other DNA
cctgccctcccataccac

SEQ ID NO: 10005 - DNA, 18 bp, synthetic construct
  source 1..18: mol_type = other DNA; mol_type = other DNA
gcctgccctcccgtacca

SEQ ID NO: 10006 - DNA, 18 bp, synthetic construct
  source 1..18: mol_type = other DNA; mol_type = other DNA
gcctgccctcccatacca

SEQ ID NO: 10007 - DNA, 18 bp, synthetic construct
  source 1..18: mol_type = other DNA; mol_type = other DNA
cgcctgccctcccgtacc

SEQ ID NO: 10008 - DNA, 18 bp, synthetic construct
  source 1..18: mol_type = other DNA; mol_type = other DNA
cgcctgccctcccatacc

SEQ ID NO: 10009 - DNA, 18 bp, synthetic construct
  source 1..18: mol_type = other DNA; mol_type = other DNA
ccgcctgccctcccgtac

SEQ ID NO: 10010 - DNA, 18 bp, synthetic construct
  source 1..18: mol_type = other DNA; mol_type = other DNA
ccgcctgccctcccatac

SEQ ID NO: 10011 - DNA, 18 bp, synthetic construct
  source 1..18: mol_type = other DNA; mol_type = other DNA
accgcctgccctcccgta

SEQ ID NO: 10012 - DNA, 18 bp, synthetic construct
  source 1..18: mol_type = other DNA; mol_type = other DNA
accgcctgccctcccata

SEQ ID NO: 10013 - DNA, 18 bp, synthetic construct
  source 1..18: mol_type = other DNA; mol_type = other DNA
gaccgcctgccctcccgt

SEQ ID NO: 10014 - DNA, 18 bp, synthetic construct
  source 1..18: mol_type = other DNA; mol_type = other DNA
gaccgcctgccctcccat

SEQ ID NO: 10015 - DNA, 18 bp, synthetic construct
  source 1..18: mol_type = other DNA; mol_type = other DNA
ggaccgcctgccctcccg

SEQ ID NO: 10016 - DNA, 18 bp, synthetic construct
  source 1..18: mol_type = other DNA; mol_type = other DNA
ggaccgcctgccctccca

SEQ ID NO: 10017 - DNA, 18 bp, synthetic construct
  source 1..18: mol_type = other DNA; mol_type = other DNA
catccctctcaccaccac

SEQ ID NO: 10018 - DNA, 18 bp, synthetic construct
  source 1..18: mol_type = other DNA; mol_type = other DNA
ccatccctctcaccacca

SEQ ID NO: 10019 - DNA, 18 bp, synthetic construct
  source 1..18: mol_type = other DNA; mol_type = other DNA
cccatccctctcaccacc

SEQ ID NO: 10020 - DNA, 18 bp, synthetic construct
  source 1..18: mol_type = other DNA; mol_type = other DNA
ccccatccctctcaccac

SEQ ID NO: 10021 - DNA, 18 bp, synthetic construct
  source 1..18: mol_type = other DNA; mol_type = other DNA
accccatccctctcacca

SEQ ID NO: 10022 - DNA, 18 bp, synthetic construct
  source 1..18: mol_type = other DNA; mol_type = other DNA
caccccatccctctcacc

SEQ ID NO: 10023 - DNA, 18 bp, synthetic construct
  source 1..18: mol_type = other DNA; mol_type = other DNA
ccaccccatccctctcac

SEQ ID NO: 10024 - DNA, 18 bp, synthetic construct
  source 1..18: mol_type = other DNA; mol_type = other DNA
cccaccccatccctctca

SEQ ID NO: 10025 - DNA, 18 bp, synthetic construct
  source 1..18: mol_type = other DNA; mol_type = other DNA
ccccaccccatccctctc

SEQ ID NO: 10026 - DNA, 18 bp, synthetic construct
  source 1..18: mol_type = other DNA; mol_type = other DNA
tccccaccccatccctct

SEQ ID NO: 10027 - DNA, 18 bp, synthetic construct
  source 1..18: mol_type = other DNA; mol_type = other DNA
ttccccaccccatccctc

SEQ ID NO: 10028 - DNA, 18 bp, synthetic construct
  source 1..18: mol_type = other DNA; mol_type = other DNA
tttccccaccccatccct

SEQ ID NO: 10029 - DNA, 18 bp, synthetic construct
  source 1..18: mol_type = other DNA; mol_type = other DNA
atttccccaccccatccc

SEQ ID NO: 10030 - DNA, 18 bp, synthetic construct
  source 1..18: mol_type = other DNA; mol_type = other DNA
catttccccaccccatcc

SEQ ID NO: 10031 - DNA, 18 bp, synthetic construct
  source 1..18: mol_type = other DNA; mol_type = other DNA
tcatttccccaccccatc

SEQ ID NO: 10032 - DNA, 18 bp, synthetic construct
  source 1..18: mol_type = other DNA; mol_type = other DNA
ctcatttccccaccccat

SEQ ID NO: 10033 - DNA, 18 bp, synthetic construct
  source 1..18: mol_type = other DNA; mol_type = other DNA
actcatttccccacccca

SEQ ID NO: 10034 - DNA, 18 bp, synthetic construct
  source 1..18: mol_type = other DNA; mol_type = other DNA
cactcatttccccacccc

SEQ ID NO: 10035 - DNA, 18 bp, synthetic construct
  source 1..18: mol_type = other DNA; mol_type = other DNA
acactcatttccccaccc

SEQ ID NO: 10036 - DNA, 18 bp, synthetic construct
  source 1..18: mol_type = other DNA; mol_type = other DNA
cacactcatttccccacc

SEQ ID NO: 10037 - DNA, 18 bp, synthetic construct
  source 1..18: mol_type = other DNA; mol_type = other DNA
ccacactcatttccccac

SEQ ID NO: 10038 - DNA, 18 bp, synthetic construct
  source 1..18: mol_type = other DNA; mol_type = other DNA
tccacactcatttcccca

SEQ ID NO: 10039 - DNA, 18 bp, synthetic construct
  source 1..18: mol_type = other DNA; mol_type = other DNA
atccacactcatttcccc

SEQ ID NO: 10040 - DNA, 18 bp, synthetic construct
  source 1..18: mol_type = other DNA; mol_type = other DNA
tatccacactcatttccc

SEQ ID NO: 10041 - DNA, 18 bp, synthetic construct
  source 1..18: mol_type = other DNA; mol_type = other DNA
ttatccacactcatttcc

SEQ ID NO: 10042 - DNA, 18 bp, synthetic construct
  source 1..18: mol_type = other DNA; mol_type = other DNA
attatccacactcatttc

SEQ ID NO: 10043 - DNA, 18 bp, synthetic construct
  source 1..18: mol_type = other DNA; mol_type = other DNA
cattatccacactcattt

SEQ ID NO: 10044 - DNA, 18 bp, synthetic construct
  source 1..18: mol_type = other DNA; mol_type = other DNA
ccattatccacactcatt

SEQ ID NO: 10045 - DNA, 18 bp, synthetic construct
  source 1..18: mol_type = other DNA; mol_type = other DNA
cccattatccacactcat

SEQ ID NO: 10046 - DNA, 18 bp, synthetic construct
  source 1..18: mol_type = other DNA; mol_type = other DNA
ccccattatccacactca

SEQ ID NO: 10047 - DNA, 18 bp, synthetic construct
  source 1..18: mol_type = other DNA; mol_type = other DNA
gccccattatccacactc

SEQ ID NO: 10048 - DNA, 18 bp, synthetic construct
  source 1..18: mol_type = other DNA; mol_type = other DNA
accccattatccacactc

SEQ ID NO: 10049 - DNA, 18 bp, synthetic construct
  source 1..18: mol_type = other DNA; mol_type = other DNA
ggccccattatccacact

SEQ ID NO: 10050 - DNA, 18 bp, synthetic construct
  source 1..18: mol_type = other DNA; mol_type = other DNA
gaccccattatccacact

SEQ ID NO: 10051 - DNA, 18 bp, synthetic construct
  source 1..18: mol_type = other DNA; mol_type = other DNA
gggccccattatccacac

SEQ ID NO: 10052 - DNA, 18 bp, synthetic construct
  source 1..18: mol_type = other DNA; mol_type = other DNA
ggaccccattatccacac

SEQ ID NO: 10053 - DNA, 18 bp, synthetic construct
  source 1..18: mol_type = other DNA; mol_type = other DNA
cgggccccattatccaca

SEQ ID NO: 10054 - DNA, 18 bp, synthetic construct
  source 1..18: mol_type = other DNA; mol_type = other DNA
cggaccccattatccaca

SEQ ID NO: 10055 - DNA, 18 bp, synthetic construct
  source 1..18: mol_type = other DNA; mol_type = other DNA
ccgggccccattatccac

SEQ ID NO: 10056 - DNA, 18 bp, synthetic construct
  source 1..18: mol_type = other DNA; mol_type = other DNA
ccggaccccattatccac

SEQ ID NO: 10057 - DNA, 18 bp, synthetic construct
  source 1..18: mol_type = other DNA; mol_type = other DNA
cccgggccccattatcca

SEQ ID NO: 10058 - DNA, 18 bp, synthetic construct
  source 1..18: mol_type = other DNA; mol_type = other DNA
cccggaccccattatcca

SEQ ID NO: 10059 - DNA, 18 bp, synthetic construct
  source 1..18: mol_type = other DNA; mol_type = other DNA
acccgggccccattatcc

SEQ ID NO: 10060 - DNA, 18 bp, synthetic construct
  source 1..18: mol_type = other DNA; mol_type = other DNA
acccggaccccattatcc

SEQ ID NO: 10061 - DNA, 18 bp, synthetic construct
  source 1..18: mol_type = other DNA; mol_type = other DNA
cacccgggccccattatc

SEQ ID NO: 10062 - DNA, 18 bp, synthetic construct
  source 1..18: mol_type = other DNA; mol_type = other DNA
cacccggaccccattatc

SEQ ID NO: 10063 - DNA, 18 bp, synthetic construct
  source 1..18: mol_type = other DNA; mol_type = other DNA
gcacccgggccccattat

SEQ ID NO: 10064 - DNA, 18 bp, synthetic construct
  source 1..18: mol_type = other DNA; mol_type = other DNA
gcacccggaccccattat

SEQ ID NO: 10065 - DNA, 18 bp, synthetic construct
  source 1..18: mol_type = other DNA; mol_type = other DNA
ggcacccgggccccatta

SEQ ID NO: 10066 - DNA, 18 bp, synthetic construct
  source 1..18: mol_type = other DNA; mol_type = other DNA
ggcacccggaccccatta

SEQ ID NO: 10067 - DNA, 18 bp, synthetic construct
  source 1..18: mol_type = other DNA; mol_type = other DNA
cggcacccgggccccatt

SEQ ID NO: 10068 - DNA, 18 bp, synthetic construct
  source 1..18: mol_type = other DNA; mol_type = other DNA
cggcacccggaccccatt

SEQ ID NO: 10069 - DNA, 18 bp, synthetic construct
  source 1..18: mol_type = other DNA; mol_type = other DNA
tcggcacccgggccccat

SEQ ID NO: 10070 - DNA, 18 bp, synthetic construct
  source 1..18: mol_type = other DNA; mol_type = other DNA
tcggcacccggaccccat

SEQ ID NO: 10071 - DNA, 18 bp, synthetic construct
  source 1..18: mol_type = other DNA; mol_type = other DNA
ctcggcacccgggcccca

SEQ ID NO: 10072 - DNA, 18 bp, synthetic construct
  source 1..18: mol_type = other DNA; mol_type = other DNA
ctcggcacccggacccca

SEQ ID NO: 10073 - DNA, 18 bp, synthetic construct
  source 1..18: mol_type = other DNA; mol_type = other DNA
gctcggcacccgggcccc

SEQ ID NO: 10074 - DNA, 18 bp, synthetic construct
  source 1..18: mol_type = other DNA; mol_type = other DNA
gctcggcacccggacccc

SEQ ID NO: 10075 - DNA, 18 bp, synthetic construct
  source 1..18: mol_type = other DNA; mol_type = other DNA
ggctcggcacccgggccc

SEQ ID NO: 10076 - DNA, 18 bp, synthetic construct
  source 1..18: mol_type = other DNA; mol_type = other DNA
ggctcggcacccggaccc

SEQ ID NO: 10077 - DNA, 18 bp, synthetic construct
  source 1..18: mol_type = other DNA; mol_type = other DNA
aggctcggcacccgggcc

SEQ ID NO: 10078 - DNA, 18 bp, synthetic construct
  source 1..18: mol_type = other DNA; mol_type = other DNA
aggctcggcacccggacc

SEQ ID NO: 10079 - DNA, 18 bp, synthetic construct
  source 1..18: mol_type = other DNA; mol_type = other DNA
caggctcggcacccgggc

SEQ ID NO: 10080 - DNA, 18 bp, synthetic construct
  source 1..18: mol_type = other DNA; mol_type = other DNA
caggctcggcacccggac

SEQ ID NO: 10081 - DNA, 18 bp, synthetic construct
  source 1..18: mol_type = other DNA; mol_type = other DNA
gcaggctcggcacccggg

SEQ ID NO: 10082 - DNA, 18 bp, synthetic construct
  source 1..18: mol_type = other DNA; mol_type = other DNA
gcaggctcggcacccgga

SEQ ID NO: 10083 - DNA, 18 bp, synthetic construct
  source 1..18: mol_type = other DNA; mol_type = other DNA
ggcaggctcggcacccgg

SEQ ID NO: 10084 - DNA, 18 bp, synthetic construct
  source 1..18: mol_type = other DNA; mol_type = other DNA
ggcaggctcggcacccga

SEQ ID NO: 10085 - DNA, 18 bp, synthetic construct
  source 1..18: mol_type = other DNA; mol_type = other DNA
aggcaggctcggcacccg

SEQ ID NO: 10086 - DNA, 18 bp, synthetic construct
  source 1..18: mol_type = other DNA; mol_type = other DNA
aggcaggctcggcaccca

SEQ ID NO: 10087 - DNA, 18 bp, synthetic construct
  source 1..18: mol_type = other DNA; mol_type = other DNA
gaggcaggctcggcaccc

SEQ ID NO: 10088 - DNA, 18 bp, synthetic construct
  source 1..18: mol_type = other DNA; mol_type = other DNA
gaggcaggctcgacaccc

SEQ ID NO: 10089 - DNA, 18 bp, synthetic construct
  source 1..18: mol_type = other DNA; mol_type = other DNA
agaggcaggctcggcacc

SEQ ID NO: 10090 - DNA, 18 bp, synthetic construct
  source 1..18: mol_type = other DNA; mol_type = other DNA
agaggcaggctcgacacc

SEQ ID NO: 10091 - DNA, 18 bp, synthetic construct
  source 1..18: mol_type = other DNA; mol_type = other DNA
aagaggcaggctcggcac

SEQ ID NO: 10092 - DNA, 18 bp, synthetic construct
  source 1..18: mol_type = other DNA; mol_type = other DNA
aagaggcaggctcgacac

SEQ ID NO: 10093 - DNA, 18 bp, synthetic construct
  source 1..18: mol_type = other DNA; mol_type = other DNA
taagaggcaggctcggca

SEQ ID NO: 10094 - DNA, 18 bp, synthetic construct
  source 1..18: mol_type = other DNA; mol_type = other DNA
taagaggcaggctcgaca

SEQ ID NO: 10095 - DNA, 18 bp, synthetic construct
  source 1..18: mol_type = other DNA; mol_type = other DNA
gtaagaggcaggctcggc

SEQ ID NO: 10096 - DNA, 18 bp, synthetic construct
  source 1..18: mol_type = other DNA; mol_type = other DNA
gtaagaggcaggctcgac

SEQ ID NO: 10097 - DNA, 18 bp, synthetic construct
  source 1..18: mol_type = other DNA; mol_type = other DNA
agtaagaggcaggctcgg

SEQ ID NO: 10098 - DNA, 18 bp, synthetic construct
  source 1..18: mol_type = other DNA; mol_type = other DNA
agtaagaggcaggctcga

SEQ ID NO: 10099 - DNA, 18 bp, synthetic construct
  source 1..18: mol_type = other DNA; mol_type = other DNA
gagtaagaggcaggctcg

SEQ ID NO: 10100 - DNA, 18 bp, synthetic construct
  source 1..18: mol_type = other DNA; mol_type = other DNA
gagtaagaggcaggctca

SEQ ID NO: 10101 - DNA, 18 bp, synthetic construct
  source 1..18: mol_type = other DNA; mol_type = other DNA
ggagtaagaggcaggctc

SEQ ID NO: 10102 - DNA, 18 bp, synthetic construct
  source 1..18: mol_type = other DNA; mol_type = other DNA
ggagtaagaggcagactc

SEQ ID NO: 10103 - DNA, 18 bp, synthetic construct
  source 1..18: mol_type = other DNA; mol_type = other DNA
gggagtaagaggcaggct

SEQ ID NO: 10104 - DNA, 18 bp, synthetic construct
  source 1..18: mol_type = other DNA; mol_type = other DNA
gggagtaagaggcagact

SEQ ID NO: 10105 - DNA, 18 bp, synthetic construct
  source 1..18: mol_type = other DNA; mol_type = other DNA
agggagtaagaggcaggc

SEQ ID NO: 10106 - DNA, 18 bp, synthetic construct
  source 1..18: mol_type = other DNA; mol_type = other DNA
agggagtaagaggcagac

SEQ ID NO: 10107 - DNA, 18 bp, synthetic construct
  source 1..18: mol_type = other DNA; mol_type = other DNA
aagggagtaagaggcagg

SEQ ID NO: 10108 - DNA, 18 bp, synthetic construct
  source 1..18: mol_type = other DNA; mol_type = other DNA
aagggagtaagaggcaga

SEQ ID NO: 10109 - DNA, 18 bp, synthetic construct
  source 1..18: mol_type = other DNA; mol_type = other DNA
aaagggagtaagaggcag

SEQ ID NO: 10110 - DNA, 18 bp, synthetic construct
  source 1..18: mol_type = other DNA; mol_type = other DNA
aaagggagtaagaggcaa

SEQ ID NO: 10111 - DNA, 18 bp, synthetic construct
  source 1..18: mol_type = other DNA; mol_type = other DNA
taaagggagtaagaggca

SEQ ID NO: 10112 - DNA, 18 bp, synthetic construct
  source 1..18: mol_type = other DNA; mol_type = other DNA
taaagggagtaagagaca

SEQ ID NO: 10113 - DNA, 18 bp, synthetic construct
  source 1..18: mol_type = other DNA; mol_type = other DNA
gtaaagggagtaagaggc

SEQ ID NO: 10114 - DNA, 18 bp, synthetic construct
  source 1..18: mol_type = other DNA; mol_type = other DNA
gtaaagggagtaagagac

SEQ ID NO: 10115 - DNA, 18 bp, synthetic construct
  source 1..18: mol_type = other DNA; mol_type = other DNA
agtaaagggagtaagagg

SEQ ID NO: 10116 - DNA, 18 bp, synthetic construct
  source 1..18: mol_type = other DNA; mol_type = other DNA
agtaaagggagtaagaga

SEQ ID NO: 10117 - DNA, 18 bp, synthetic construct
  source 1..18: mol_type = other DNA; mol_type = other DNA
gagtaaagggagtaagag

SEQ ID NO: 10118 - DNA, 18 bp, synthetic construct
  source 1..18: mol_type = other DNA; mol_type = other DNA
gagtaaagggagtaagaa

SEQ ID NO: 10119 - DNA, 18 bp, synthetic construct
  source 1..18: mol_type = other DNA; mol_type = other DNA
agagtaaagggagtaaga

SEQ ID NO: 10120 - DNA, 18 bp, synthetic construct
  source 1..18: mol_type = other DNA; mol_type = other DNA
agagtaaagggagtaaaa

SEQ ID NO: 10121 - DNA, 18 bp, synthetic construct
  source 1..18: mol_type = other DNA; mol_type = other DNA
cagagtaaagggagtaag

SEQ ID NO: 10122 - DNA, 18 bp, synthetic construct
  source 1..18: mol_type = other DNA; mol_type = other DNA
cagagtaaagggagtaaa

SEQ ID NO: 10123 - DNA, 18 bp, synthetic construct
  source 1..18: mol_type = other DNA; mol_type = other DNA
acagagtaaagggagtaa

SEQ ID NO: 10124 - DNA, 18 bp, synthetic construct
  source 1..18: mol_type = other DNA; mol_type = other DNA
acagagtaaagggaataa

SEQ ID NO: 10125 - DNA, 18 bp, synthetic construct
  source 1..18: mol_type = other DNA; mol_type = other DNA
aacagagtaaagggagta

SEQ ID NO: 10126 - DNA, 18 bp, synthetic construct
  source 1..18: mol_type = other DNA; mol_type = other DNA
aacagagtaaagggaata

SEQ ID NO: 10127 - DNA, 18 bp, synthetic construct
  source 1..18: mol_type = other DNA; mol_type = other DNA
aaacagagtaaagggagt

SEQ ID NO: 10128 - DNA, 18 bp, synthetic construct
  source 1..18: mol_type = other DNA; mol_type = other DNA
aaacagagtaaagggaat

SEQ ID NO: 10129 - DNA, 18 bp, synthetic construct
  source 1..18: mol_type = other DNA; mol_type = other DNA
gaaacagagtaaagggag

SEQ ID NO: 10130 - DNA, 18 bp, synthetic construct
  source 1..18: mol_type = other DNA; mol_type = other DNA
gaaacagagtaaagggaa

SEQ ID NO: 10131 - DNA, 18 bp, synthetic construct
  source 1..18: mol_type = other DNA; mol_type = other DNA
agaaacagagtaaaggga

SEQ ID NO: 10132 - DNA, 18 bp, synthetic construct
  source 1..18: mol_type = other DNA; mol_type = other DNA
agaaacagagtaaaggaa

SEQ ID NO: 10133 - DNA, 18 bp, synthetic construct
  source 1..18: mol_type = other DNA; mol_type = other DNA
aagaaacagagtaaaggg

SEQ ID NO: 10134 - DNA, 18 bp, synthetic construct
  source 1..18: mol_type = other DNA; mol_type = other DNA
aagaaacagagtaaagga

SEQ ID NO: 10135 - DNA, 18 bp, synthetic construct
  source 1..18: mol_type = other DNA; mol_type = other DNA
caagaaacagagtaaagg

SEQ ID NO: 10136 - DNA, 18 bp, synthetic construct
  source 1..18: mol_type = other DNA; mol_type = other DNA
caagaaacagagtaaaga

SEQ ID NO: 10137 - DNA, 18 bp, synthetic construct
  source 1..18: mol_type = other DNA; mol_type = other DNA
tcaagaaacagagtaaag

SEQ ID NO: 10138 - DNA, 18 bp, synthetic construct
  source 1..18: mol_type = other DNA; mol_type = other DNA
tcaagaaacagagtaaaa

SEQ ID NO: 10139 - DNA, 18 bp, synthetic construct
  source 1..18: mol_type = other DNA; mol_type = other DNA
atcaagaaacagagtaaa

SEQ ID NO: 10140 - DNA, 18 bp, synthetic construct
  source 1..18: mol_type = other DNA; mol_type = other DNA
atcaagaaacagaataaa

SEQ ID NO: 10141 - DNA, 18 bp, synthetic construct
  source 1..18: mol_type = other DNA; mol_type = other DNA
aatcaagaaacagagtaa

SEQ ID NO: 10142 - DNA, 18 bp, synthetic construct
  source 1..18: mol_type = other DNA; mol_type = other DNA
aatcaagaaacagaataa

SEQ ID NO: 10143 - DNA, 18 bp, synthetic construct
  source 1..18: mol_type = other DNA; mol_type = other DNA
gaatcaagaaacagagta

SEQ ID NO: 10144 - DNA, 18 bp, synthetic construct
  source 1..18: mol_type = other DNA; mol_type = other DNA
gaatcaagaaacagaata

SEQ ID NO: 10145 - DNA, 18 bp, synthetic construct
  source 1..18: mol_type = other DNA; mol_type = other DNA
ggaatcaagaaacagagt

SEQ ID NO: 10146 - DNA, 18 bp, synthetic construct
  source 1..18: mol_type = other DNA; mol_type = other DNA
ggaatcaagaaacagaat

SEQ ID NO: 10147 - DNA, 18 bp, synthetic construct
  source 1..18: mol_type = other DNA; mol_type = other DNA
tggaatcaagaaacagag

SEQ ID NO: 10148 - DNA, 18 bp, synthetic construct
  source 1..18: mol_type = other DNA; mol_type = other DNA
tggaatcaagaaacagaa

SEQ ID NO: 10149 - DNA, 18 bp, synthetic construct
  source 1..18: mol_type = other DNA; mol_type = other DNA
ttggaatcaagaaacaga

SEQ ID NO: 10150 - DNA, 18 bp, synthetic construct
  source 1..18: mol_type = other DNA; mol_type = other DNA
ttggaatcaagaaacaaa

SEQ ID NO: 10151 - DNA, 18 bp, synthetic construct
  source 1..18: mol_type = other DNA; mol_type = other DNA
cttggaatcaagaaacag

SEQ ID NO: 10152 - DNA, 18 bp, synthetic construct
  source 1..18: mol_type = other DNA; mol_type = other DNA
cttggaatcaagaaacaa

SEQ ID NO: 10153 - DNA, 18 bp, synthetic construct
  source 1..18: mol_type = other DNA; mol_type = other DNA
gcttggaatcaagaaaca

SEQ ID NO: 10154 - DNA, 18 bp, synthetic construct
  source 1..18: mol_type = other DNA; mol_type = other DNA
gcttggaatcaaaaaaca

SEQ ID NO: 10155 - DNA, 18 bp, synthetic construct
  source 1..18: mol_type = other DNA; mol_type = other DNA
ggcttggaatcaagaaac

SEQ ID NO: 10156 - DNA, 18 bp, synthetic construct
  source 1..18: mol_type = other DNA; mol_type = other DNA
ggcttggaatcaaaaaac

SEQ ID NO: 10157 - DNA, 18 bp, synthetic construct
  source 1..18: mol_type = other DNA; mol_type = other DNA
aggcttggaatcaagaaa

SEQ ID NO: 10158 - DNA, 18 bp, synthetic construct
  source 1..18: mol_type = other DNA; mol_type = other DNA
aggcttggaatcaaaaaa

SEQ ID NO: 10159 - DNA, 18 bp, synthetic construct
  source 1..18: mol_type = other DNA; mol_type = other DNA
gaggcttggaatcaagaa

SEQ ID NO: 10160 - DNA, 18 bp, synthetic construct
  source 1..18: mol_type = other DNA; mol_type = other DNA
gaggcttggaatcaaaaa

SEQ ID NO: 10161 - DNA, 18 bp, synthetic construct
  source 1..18: mol_type = other DNA; mol_type = other DNA
ggaggcttggaatcaaga

SEQ ID NO: 10162 - DNA, 18 bp, synthetic construct
  source 1..18: mol_type = other DNA; mol_type = other DNA
ggaggcttggaatcaaaa

SEQ ID NO: 10163 - DNA, 18 bp, synthetic construct
  source 1..18: mol_type = other DNA; mol_type = other DNA
tggaggcttggaatcaag

SEQ ID NO: 10164 - DNA, 18 bp, synthetic construct
  source 1..18: mol_type = other DNA; mol_type = other DNA
tggaggcttggaatcaaa

SEQ ID NO: 10165 - DNA, 18 bp, synthetic construct
  source 1..18: mol_type = other DNA; mol_type = other DNA
atggaggcttggaatcaa

SEQ ID NO: 10166 - DNA, 18 bp, synthetic construct
  source 1..18: mol_type = other DNA; mol_type = other DNA
atggaggcttgaaatcaa

SEQ ID NO: 10167 - DNA, 18 bp, synthetic construct
  source 1..18: mol_type = other DNA; mol_type = other DNA
aatggaggcttggaatca

SEQ ID NO: 10168 - DNA, 18 bp, synthetic construct
  source 1..18: mol_type = other DNA; mol_type = other DNA
aatggaggcttgaaatca

SEQ ID NO: 10169 - DNA, 18 bp, synthetic construct
  source 1..18: mol_type = other DNA; mol_type = other DNA
gaatggaggcttggaatc

SEQ ID NO: 10170 - DNA, 18 bp, synthetic construct
  source 1..18: mol_type = other DNA; mol_type = other DNA
gaatggaggcttgaaatc

SEQ ID NO: 10171 - DNA, 18 bp, synthetic construct
  source 1..18: mol_type = other DNA; mol_type = other DNA
cgaatggaggcttggaat

SEQ ID NO: 10172 - DNA, 18 bp, synthetic construct
  source 1..18: mol_type = other DNA; mol_type = other DNA
cgaatggaggcttgaaat

SEQ ID NO: 10173 - DNA, 18 bp, synthetic construct
  source 1..18: mol_type = other DNA; mol_type = other DNA
ccgaatggaggcttggaa

SEQ ID NO: 10174 - DNA, 18 bp, synthetic construct
  source 1..18: mol_type = other DNA; mol_type = other DNA
ccgaatggaggcttgaaa

SEQ ID NO: 10175 - DNA, 18 bp, synthetic construct
  source 1..18: mol_type = other DNA; mol_type = other DNA
tccgaatggaggcttgga

SEQ ID NO: 10176 - DNA, 18 bp, synthetic construct
  source 1..18: mol_type = other DNA; mol_type = other DNA
tccgaatggaggcttgaa

SEQ ID NO: 10177 - DNA, 18 bp, synthetic construct
  source 1..18: mol_type = other DNA; mol_type = other DNA
ctccgaatggaggcttgg

SEQ ID NO: 10178 - DNA, 18 bp, synthetic construct
  source 1..18: mol_type = other DNA; mol_type = other DNA
ctccgaatggaggcttga

SEQ ID NO: 10179 - DNA, 18 bp, synthetic construct
  source 1..18: mol_type = other DNA; mol_type = other DNA
tctccgaatggaggcttg

SEQ ID NO: 10180 - DNA, 18 bp, synthetic construct
  source 1..18: mol_type = other DNA; mol_type = other DNA
tctccgaatggaggctta

SEQ ID NO: 10181 - DNA, 18 bp, synthetic construct
  source 1..18: mol_type = other DNA; mol_type = other DNA
ttctccgaatggaggctt

SEQ ID NO: 10182 - DNA, 18 bp, synthetic construct
  source 1..18: mol_type = other DNA; mol_type = other DNA
ttctccgaatggagactt

SEQ ID NO: 10183 - DNA, 18 bp, synthetic construct
  source 1..18: mol_type = other DNA; mol_type = other DNA
cttctccgaatggaggct

SEQ ID NO: 10184 - DNA, 18 bp, synthetic construct
  source 1..18: mol_type = other DNA; mol_type = other DNA
cttctccgaatggagact

SEQ ID NO: 10185 - DNA, 18 bp, synthetic construct
  source 1..18: mol_type = other DNA; mol_type = other DNA
tcttctccgaatggaggc

SEQ ID NO: 10186 - DNA, 18 bp, synthetic construct
  source 1..18: mol_type = other DNA; mol_type = other DNA
tcttctccgaatggagac

SEQ ID NO: 10187 - DNA, 18 bp, synthetic construct
  source 1..18: mol_type = other DNA; mol_type = other DNA
ttcttctccgaatggagg

SEQ ID NO: 10188 - DNA, 18 bp, synthetic construct
  source 1..18: mol_type = other DNA; mol_type = other DNA
ttcttctccgaatggaga

SEQ ID NO: 10189 - DNA, 18 bp, synthetic construct
  source 1..18: mol_type = other DNA; mol_type = other DNA
tttcttctccgaatggag

SEQ ID NO: 10190 - DNA, 18 bp, synthetic construct
  source 1..18: mol_type = other DNA; mol_type = other DNA
tttcttctccgaatggaa

SEQ ID NO: 10191 - DNA, 18 bp, synthetic construct
  source 1..18: mol_type = other DNA; mol_type = other DNA
ttttcttctccgaatgga

SEQ ID NO: 10192 - DNA, 18 bp, synthetic construct
  source 1..18: mol_type = other DNA; mol_type = other DNA
ttttcttctccgaatgaa

SEQ ID NO: 10193 - DNA, 18 bp, synthetic construct
  source 1..18: mol_type = other DNA; mol_type = other DNA
cttttcttctccgaatgg

SEQ ID NO: 10194 - DNA, 18 bp, synthetic construct
  source 1..18: mol_type = other DNA; mol_type = other DNA
cttttcttctccgaatga

SEQ ID NO: 10195 - DNA, 18 bp, synthetic construct
  source 1..18: mol_type = other DNA; mol_type = other DNA
ccttttcttctccgaatg

SEQ ID NO: 10196 - DNA, 18 bp, synthetic construct
  source 1..18: mol_type = other DNA; mol_type = other DNA
ccttttcttctccgaata

SEQ ID NO: 10197 - DNA, 18 bp, synthetic construct
  source 1..18: mol_type = other DNA; mol_type = other DNA
cccttttcttctccgaat

SEQ ID NO: 10198 - DNA, 18 bp, synthetic construct
  source 1..18: mol_type = other DNA; mol_type = other DNA
cccttttcttctccaaat

SEQ ID NO: 10199 - DNA, 18 bp, synthetic construct
  source 1..18: mol_type = other DNA; mol_type = other DNA
ccccttttcttctccgaa

SEQ ID NO: 10200 - DNA, 18 bp, synthetic construct
  source 1..18: mol_type = other DNA; mol_type = other DNA
ccccttttcttctccaaa

SEQ ID NO: 10201 - DNA, 18 bp, synthetic construct
  source 1..18: mol_type = other DNA; mol_type = other DNA
cccccttttcttctccga

SEQ ID NO: 10202 - DNA, 18 bp, synthetic construct
  source 1..18: mol_type = other DNA; mol_type = other DNA
cccccttttcttctccaa

SEQ ID NO: 10203 - DNA, 18 bp, synthetic construct
  source 1..18: mol_type = other DNA; mol_type = other DNA
acccccttttcttctccg

SEQ ID NO: 10204 - DNA, 18 bp, synthetic construct
  source 1..18: mol_type = other DNA; mol_type = other DNA
acccccttttcttctcca

SEQ ID NO: 10205 - DNA, 18 bp, synthetic construct
  source 1..18: mol_type = other DNA; mol_type = other DNA
cacccccttttcttctcc

SEQ ID NO: 10206 - DNA, 18 bp, synthetic construct
  source 1..18: mol_type = other DNA; mol_type = other DNA
tcacccccttttcttctc

SEQ ID NO: 10207 - DNA, 18 bp, synthetic construct
  source 1..18: mol_type = other DNA; mol_type = other DNA
ctcacccccttttcttct

SEQ ID NO: 10208 - DNA, 18 bp, synthetic construct
  source 1..18: mol_type = other DNA; mol_type = other DNA
actcacccccttttcttc

SEQ ID NO: 10209 - DNA, 18 bp, synthetic construct
  source 1..18: mol_type = other DNA; mol_type = other DNA
gactcacccccttttctt

SEQ ID NO: 10210 - DNA, 18 bp, synthetic construct
  source 1..18: mol_type = other DNA; mol_type = other DNA
aactcacccccttttctt

SEQ ID NO: 10211 - DNA, 18 bp, synthetic construct
  source 1..18: mol_type = other DNA; mol_type = other DNA
tgactcacccccttttct

SEQ ID NO: 10212 - DNA, 18 bp, synthetic construct
  source 1..18: mol_type = other DNA; mol_type = other DNA
taactcacccccttttct

SEQ ID NO: 10213 - DNA, 18 bp, synthetic construct
  source 1..18: mol_type = other DNA; mol_type = other DNA
atgactcacccccttttc

SEQ ID NO: 10214 - DNA, 18 bp, synthetic construct
  source 1..18: mol_type = other DNA; mol_type = other DNA
ataactcacccccttttc

SEQ ID NO: 10215 - DNA, 18 bp, synthetic construct
  source 1..18: mol_type = other DNA; mol_type = other DNA
gatgactcaccccctttt

SEQ ID NO: 10216 - DNA, 18 bp, synthetic construct
  source 1..18: mol_type = other DNA; mol_type = other DNA
gataactcaccccctttt

SEQ ID NO: 10217 - DNA, 18 bp, synthetic construct
  source 1..18: mol_type = other DNA; mol_type = other DNA
agatgactcacccccttt

SEQ ID NO: 10218 - DNA, 18 bp, synthetic construct
  source 1..18: mol_type = other DNA; mol_type = other DNA
agataactcacccccttt

SEQ ID NO: 10219 - DNA, 18 bp, synthetic construct
  source 1..18: mol_type = other DNA; mol_type = other DNA
cagatgactcaccccctt

SEQ ID NO: 10220 - DNA, 18 bp, synthetic construct
  source 1..18: mol_type = other DNA; mol_type = other DNA
cagataactcaccccctt

SEQ ID NO: 10221 - DNA, 18 bp, synthetic construct
  source 1..18: mol_type = other DNA; mol_type = other DNA
gcagatgactcaccccct

SEQ ID NO: 10222 - DNA, 18 bp, synthetic construct
  source 1..18: mol_type = other DNA; mol_type = other DNA
gcagataactcaccccct

SEQ ID NO: 10223 - DNA, 18 bp, synthetic construct
  source 1..18: mol_type = other DNA; mol_type = other DNA
ggcagatgactcaccccc

SEQ ID NO: 10224 - DNA, 18 bp, synthetic construct
  source 1..18: mol_type = other DNA; mol_type = other DNA
ggcagataactcaccccc

SEQ ID NO: 10225 - DNA, 18 bp, synthetic construct
  source 1..18: mol_type = other DNA; mol_type = other DNA
aggcagatgactcacccc

SEQ ID NO: 10226 - DNA, 18 bp, synthetic construct
  source 1..18: mol_type = other DNA; mol_type = other DNA
aggcagataactcacccc

SEQ ID NO: 10227 - DNA, 18 bp, synthetic construct
  source 1..18: mol_type = other DNA; mol_type = other DNA
caggcagatgactcaccc

SEQ ID NO: 10228 - DNA, 18 bp, synthetic construct
  source 1..18: mol_type = other DNA; mol_type = other DNA
caggcagataactcaccc

SEQ ID NO: 10229 - DNA, 18 bp, synthetic construct
  source 1..18: mol_type = other DNA; mol_type = other DNA
acaggcagatgactcacc

SEQ ID NO: 10230 - DNA, 18 bp, synthetic construct
  source 1..18: mol_type = other DNA; mol_type = other DNA
acaggcagataactcacc

SEQ ID NO: 10231 - DNA, 18 bp, synthetic construct
  source 1..18: mol_type = other DNA; mol_type = other DNA
cacaggcagatgactcac

SEQ ID NO: 10232 - DNA, 18 bp, synthetic construct
  source 1..18: mol_type = other DNA; mol_type = other DNA
cacaggcagataactcac

SEQ ID NO: 10233 - DNA, 18 bp, synthetic construct
  source 1..18: mol_type = other DNA; mol_type = other DNA
acacaggcagatgactca

SEQ ID NO: 10234 - DNA, 18 bp, synthetic construct
  source 1..18: mol_type = other DNA; mol_type = other DNA
acacaggcagataactca

SEQ ID NO: 10235 - DNA, 18 bp, synthetic construct
  source 1..18: mol_type = other DNA; mol_type = other DNA
gacacaggcagatgactc

SEQ ID NO: 10236 - DNA, 18 bp, synthetic construct
  source 1..18: mol_type = other DNA; mol_type = other DNA
gacacaggcagataactc

SEQ ID NO: 10237 - DNA, 18 bp, synthetic construct
  source 1..18: mol_type = other DNA; mol_type = other DNA
ggacacaggcagatgact

SEQ ID NO: 10238 - DNA, 18 bp, synthetic construct
  source 1..18: mol_type = other DNA; mol_type = other DNA
ggacacaggcagataact

SEQ ID NO: 10239 - DNA, 18 bp, synthetic construct
  source 1..18: mol_type = other DNA; mol_type = other DNA
gggacacaggcagatgac

SEQ ID NO: 10240 - DNA, 18 bp, synthetic construct
  source 1..18: mol_type = other DNA; mol_type = other DNA
gggacacaggcagataac

SEQ ID NO: 10241 - DNA, 18 bp, synthetic construct
  source 1..18: mol_type = other DNA; mol_type = other DNA
tgggacacaggcagatga

SEQ ID NO: 10242 - DNA, 18 bp, synthetic construct
  source 1..18: mol_type = other DNA; mol_type = other DNA
gtggacacaggcagatga

SEQ ID NO: 10243 - DNA, 18 bp, synthetic construct
  source 1..18: mol_type = other DNA; mol_type = other DNA
ggtgacacaggcagatga

SEQ ID NO: 10244 - DNA, 18 bp, synthetic construct
  source 1..18: mol_type = other DNA; mol_type = other DNA
gggtacacaggcagatga

SEQ ID NO: 10245 - DNA, 18 bp, synthetic construct
  source 1..18: mol_type = other DNA; mol_type = other DNA
ttgggacacaggcagatg

SEQ ID NO: 10246 - DNA, 18 bp, synthetic construct
  source 1..18: mol_type = other DNA; mol_type = other DNA
tgtggacacaggcagatg

SEQ ID NO: 10247 - DNA, 18 bp, synthetic construct
  source 1..18: mol_type = other DNA; mol_type = other DNA
tggtgacacaggcagatg

SEQ ID NO: 10248 - DNA, 18 bp, synthetic construct
  source 1..18: mol_type = other DNA; mol_type = other DNA
tgggtacacaggcagatg

SEQ ID NO: 10249 - DNA, 18 bp, synthetic construct
  source 1..18: mol_type = other DNA; mol_type = other DNA
cttgggacacaggcagat

SEQ ID NO: 10250 - DNA, 18 bp, synthetic construct
  source 1..18: mol_type = other DNA; mol_type = other DNA
ctgtggacacaggcagat

SEQ ID NO: 10251 - DNA, 18 bp, synthetic construct
  source 1..18: mol_type = other DNA; mol_type = other DNA
ctggtgacacaggcagat

SEQ ID NO: 10252 - DNA, 18 bp, synthetic construct
  source 1..18: mol_type = other DNA; mol_type = other DNA
ctgggtacacaggcagat

SEQ ID NO: 10253 - DNA, 18 bp, synthetic construct
  source 1..18: mol_type = other DNA; mol_type = other DNA
ccttgggacacaggcaga

SEQ ID NO: 10254 - DNA, 18 bp, synthetic construct
  source 1..18: mol_type = other DNA; mol_type = other DNA
cctgtggacacaggcaga

SEQ ID NO: 10255 - DNA, 18 bp, synthetic construct
  source 1..18: mol_type = other DNA; mol_type = other DNA
cctggtgacacaggcaga

SEQ ID NO: 10256 - DNA, 18 bp, synthetic construct
  source 1..18: mol_type = other DNA; mol_type = other DNA
cctgggtacacaggcaga

SEQ ID NO: 10257 - DNA, 18 bp, synthetic construct
  source 1..18: mol_type = other DNA; mol_type = other DNA
cccttgggacacaggcag

SEQ ID NO: 10258 - DNA, 18 bp, synthetic construct
  source 1..18: mol_type = other DNA; mol_type = other DNA
ccctgtggacacaggcag

SEQ ID NO: 10259 - DNA, 18 bp, synthetic construct
  source 1..18: mol_type = other DNA; mol_type = other DNA
ccctggtgacacaggcag

SEQ ID NO: 10260 - DNA, 18 bp, synthetic construct
  source 1..18: mol_type = other DNA; mol_type = other DNA
ccctgggtacacaggcag

SEQ ID NO: 10261 - DNA, 18 bp, synthetic construct
  source 1..18: mol_type = other DNA; mol_type = other DNA
gcccttgggacacaggca

SEQ ID NO: 10262 - DNA, 18 bp, synthetic construct
  source 1..18: mol_type = other DNA; mol_type = other DNA
gccctgtggacacaggca

SEQ ID NO: 10263 - DNA, 18 bp, synthetic construct
  source 1..18: mol_type = other DNA; mol_type = other DNA
gccctggtgacacaggca

SEQ ID NO: 10264 - DNA, 18 bp, synthetic construct
  source 1..18: mol_type = other DNA; mol_type = other DNA
gccctgggtacacaggca

SEQ ID NO: 10265 - DNA, 18 bp, synthetic construct
  source 1..18: mol_type = other DNA; mol_type = other DNA
ggcccttgggacacaggc

SEQ ID NO: 10266 - DNA, 18 bp, synthetic construct
  source 1..18: mol_type = other DNA; mol_type = other DNA
ggccctgtggacacaggc

SEQ ID NO: 10267 - DNA, 18 bp, synthetic construct
  source 1..18: mol_type = other DNA; mol_type = other DNA
ggccctggtgacacaggc

SEQ ID NO: 10268 - DNA, 18 bp, synthetic construct
  source 1..18: mol_type = other DNA; mol_type = other DNA
ggccctgggtacacaggc

SEQ ID NO: 10269 - DNA, 18 bp, synthetic construct
  source 1..18: mol_type = other DNA; mol_type = other DNA
aggcccttgggacacagg

SEQ ID NO: 10270 - DNA, 18 bp, synthetic construct
  source 1..18: mol_type = other DNA; mol_type = other DNA
aggccctgtggacacagg

SEQ ID NO: 10271 - DNA, 18 bp, synthetic construct
  source 1..18: mol_type = other DNA; mol_type = other DNA
aggccctggtgacacagg

SEQ ID NO: 10272 - DNA, 18 bp, synthetic construct
  source 1..18: mol_type = other DNA; mol_type = other DNA
aggccctgggtacacagg

SEQ ID NO: 10273 - DNA, 18 bp, synthetic construct
  source 1..18: mol_type = other DNA; mol_type = other DNA
aaggcccttgggacacag

SEQ ID NO: 10274 - DNA, 18 bp, synthetic construct
  source 1..18: mol_type = other DNA; mol_type = other DNA
aaggccctgtggacacag

SEQ ID NO: 10275 - DNA, 18 bp, synthetic construct
  source 1..18: mol_type = other DNA; mol_type = other DNA
aaggccctggtgacacag

SEQ ID NO: 10276 - DNA, 18 bp, synthetic construct
  source 1..18: mol_type = other DNA; mol_type = other DNA
aaggccctgggtacacag

SEQ ID NO: 10277 - DNA, 18 bp, synthetic construct
  source 1..18: mol_type = other DNA; mol_type = other DNA
caaggccctgggaacaca

SEQ ID NO: 10278 - DNA, 18 bp, synthetic construct
  source 1..18: mol_type = other DNA; mol_type = other DNA
caaggcccttgggacaca

SEQ ID NO: 10279 - DNA, 18 bp, synthetic construct
  source 1..18: mol_type = other DNA; mol_type = other DNA
caaggccctgtggacaca

SEQ ID NO: 10280 - DNA, 18 bp, synthetic construct
  source 1..18: mol_type = other DNA; mol_type = other DNA
caaggccctggtgacaca

SEQ ID NO: 10281 - DNA, 18 bp, synthetic construct
  source 1..18: mol_type = other DNA; mol_type = other DNA
caaggccctgggtacaca

SEQ ID NO: 10282 - DNA, 18 bp, synthetic construct
  source 1..18: mol_type = other DNA; mol_type = other DNA
ccaaggccctgggaacac

SEQ ID NO: 10283 - DNA, 18 bp, synthetic construct
  source 1..18: mol_type = other DNA; mol_type = other DNA
ccaaggcccttgggacac

SEQ ID NO: 10284 - DNA, 18 bp, synthetic construct
  source 1..18: mol_type = other DNA; mol_type = other DNA
ccaaggccctgtggacac

SEQ ID NO: 10285 - DNA, 18 bp, synthetic construct
  source 1..18: mol_type = other DNA; mol_type = other DNA
ccaaggccctggtgacac

SEQ ID NO: 10286 - DNA, 18 bp, synthetic construct
  source 1..18: mol_type = other DNA; mol_type = other DNA
ccaaggccctgggtacac

SEQ ID NO: 10287 - DNA, 18 bp, synthetic construct
  source 1..18: mol_type = other DNA; mol_type = other DNA
gccaaggccctgggaaca

SEQ ID NO: 10288 - DNA, 18 bp, synthetic construct
  source 1..18: mol_type = other DNA; mol_type = other DNA
gccaaggcccttgggaca

SEQ ID NO: 10289 - DNA, 18 bp, synthetic construct
  source 1..18: mol_type = other DNA; mol_type = other DNA
gccaaggccctgtggaca

SEQ ID NO: 10290 - DNA, 18 bp, synthetic construct
  source 1..18: mol_type = other DNA; mol_type = other DNA
gccaaggccctggtgaca

SEQ ID NO: 10291 - DNA, 18 bp, synthetic construct
  source 1..18: mol_type = other DNA; mol_type = other DNA
gccaaggccctgggtaca

SEQ ID NO: 10292 - DNA, 18 bp, synthetic construct
  source 1..18: mol_type = other DNA; mol_type = other DNA
agccaaggccctgggaac

SEQ ID NO: 10293 - DNA, 18 bp, synthetic construct
  source 1..18: mol_type = other DNA; mol_type = other DNA
agccaaggcccttgggac

SEQ ID NO: 10294 - DNA, 18 bp, synthetic construct
  source 1..18: mol_type = other DNA; mol_type = other DNA
agccaaggccctgtggac

SEQ ID NO: 10295 - DNA, 18 bp, synthetic construct
  source 1..18: mol_type = other DNA; mol_type = other DNA
agccaaggccctggtgac

SEQ ID NO: 10296 - DNA, 18 bp, synthetic construct
  source 1..18: mol_type = other DNA; mol_type = other DNA
agccaaggccctgggtac

SEQ ID NO: 10297 - DNA, 18 bp, synthetic construct
  source 1..18: mol_type = other DNA; mol_type = other DNA
aagccaaggccctgggaa

SEQ ID NO: 10298 - DNA, 18 bp, synthetic construct
  source 1..18: mol_type = other DNA; mol_type = other DNA
aagccaaggcccttggga

SEQ ID NO: 10299 - DNA, 18 bp, synthetic construct
  source 1..18: mol_type = other DNA; mol_type = other DNA
aagccaaggccctgtgga

SEQ ID NO: 10300 - DNA, 18 bp, synthetic construct
  source 1..18: mol_type = other DNA; mol_type = other DNA
aagccaaggccctggtga

SEQ ID NO: 10301 - DNA, 18 bp, synthetic construct
  source 1..18: mol_type = other DNA; mol_type = other DNA
aagccaaggccctgggta

SEQ ID NO: 10302 - DNA, 18 bp, synthetic construct
  source 1..18: mol_type = other DNA; mol_type = other DNA
aaagccaaggccctggga

SEQ ID NO: 10303 - DNA, 18 bp, synthetic construct
  source 1..18: mol_type = other DNA; mol_type = other DNA
aaagccaaggcccttggg

SEQ ID NO: 10304 - DNA, 18 bp, synthetic construct
  source 1..18: mol_type = other DNA; mol_type = other DNA
aaagccaaggccctgtgg

SEQ ID NO: 10305 - DNA, 18 bp, synthetic construct
  source 1..18: mol_type = other DNA; mol_type = other DNA
aaagccaaggccctggtg

SEQ ID NO: 10306 - DNA, 18 bp, synthetic construct
  source 1..18: mol_type = other DNA; mol_type = other DNA
aaagccaaggccctgggt

SEQ ID NO: 10307 - DNA, 18 bp, synthetic construct
  source 1..18: mol_type = other DNA; mol_type = other DNA
caaagccaaggccctggg

SEQ ID NO: 10308 - DNA, 18 bp, synthetic construct
  source 1..18: mol_type = other DNA; mol_type = other DNA
caaagccaaggccctgga

SEQ ID NO: 10309 - DNA, 18 bp, synthetic construct
  source 1..18: mol_type = other DNA; mol_type = other DNA
gcaaagccaaggccctgg

SEQ ID NO: 10310 - DNA, 18 bp, synthetic construct
  source 1..18: mol_type = other DNA; mol_type = other DNA
gcaaagccaaggccctga

SEQ ID NO: 10311 - DNA, 18 bp, synthetic construct
  source 1..18: mol_type = other DNA; mol_type = other DNA
ggcaaagccaaggccctg

SEQ ID NO: 10312 - DNA, 18 bp, synthetic construct
  source 1..18: mol_type = other DNA; mol_type = other DNA
ggcaaagccaaggcccta

SEQ ID NO: 10313 - DNA, 18 bp, synthetic construct
  source 1..18: mol_type = other DNA; mol_type = other DNA
aggcaaagccaaggccct

SEQ ID NO: 10314 - DNA, 18 bp, synthetic construct
  source 1..18: mol_type = other DNA; mol_type = other DNA
aggcaaagccaagaccct

SEQ ID NO: 10315 - DNA, 18 bp, synthetic construct
  source 1..18: mol_type = other DNA; mol_type = other DNA
caggcaaagccaaggccc

SEQ ID NO: 10316 - DNA, 18 bp, synthetic construct
  source 1..18: mol_type = other DNA; mol_type = other DNA
caggcaaagccaagaccc

SEQ ID NO: 10317 - DNA, 18 bp, synthetic construct
  source 1..18: mol_type = other DNA; mol_type = other DNA
tcaggcaaagccaaggcc

SEQ ID NO: 10318 - DNA, 18 bp, synthetic construct
  source 1..18: mol_type = other DNA; mol_type = other DNA
tcaggcaaagccaagacc

SEQ ID NO: 10319 - DNA, 18 bp, synthetic construct
  source 1..18: mol_type = other DNA; mol_type = other DNA
gtcaggcaaagccaaggc

SEQ ID NO: 10320 - DNA, 18 bp, synthetic construct
  source 1..18: mol_type = other DNA; mol_type = other DNA
gtcaggcaaagccaagac

SEQ ID NO: 10321 - DNA, 18 bp, synthetic construct
  source 1..18: mol_type = other DNA; mol_type = other DNA
ggtcaggcaaagccaagg

SEQ ID NO: 10322 - DNA, 18 bp, synthetic construct
  source 1..18: mol_type = other DNA; mol_type = other DNA
ggtcaggcaaagccaaga

SEQ ID NO: 10323 - DNA, 18 bp, synthetic construct
  source 1..18: mol_type = other DNA; mol_type = other DNA
gggtcaggcaaagccaag

SEQ ID NO: 10324 - DNA, 18 bp, synthetic construct
  source 1..18: mol_type = other DNA; mol_type = other DNA
gggtcaggcaaagccaaa

SEQ ID NO: 10325 - DNA, 18 bp, synthetic construct
  source 1..18: mol_type = other DNA; mol_type = other DNA
tgggtcaggcaaagccaa

SEQ ID NO: 10326 - DNA, 18 bp, synthetic construct
  source 1..18: mol_type = other DNA; mol_type = other DNA
gtggtcaggcaaagccaa

SEQ ID NO: 10327 - DNA, 18 bp, synthetic construct
  source 1..18: mol_type = other DNA; mol_type = other DNA
ggtgtcaggcaaagccaa

SEQ ID NO: 10328 - DNA, 18 bp, synthetic construct
  source 1..18: mol_type = other DNA; mol_type = other DNA
gggttcaggcaaagccaa

SEQ ID NO: 10329 - DNA, 18 bp, synthetic construct
  source 1..18: mol_type = other DNA; mol_type = other DNA
atgggtcaggcaaagcca

SEQ ID NO: 10330 - DNA, 18 bp, synthetic construct
  source 1..18: mol_type = other DNA; mol_type = other DNA
agtggtcaggcaaagcca

SEQ ID NO: 10331 - DNA, 18 bp, synthetic construct
  source 1..18: mol_type = other DNA; mol_type = other DNA
aggtgtcaggcaaagcca

SEQ ID NO: 10332 - DNA, 18 bp, synthetic construct
  source 1..18: mol_type = other DNA; mol_type = other DNA
agggttcaggcaaagcca

SEQ ID NO: 10333 - DNA, 18 bp, synthetic construct
  source 1..18: mol_type = other DNA; mol_type = other DNA
catgggtcaggcaaagcc

SEQ ID NO: 10334 - DNA, 18 bp, synthetic construct
  source 1..18: mol_type = other DNA; mol_type = other DNA
cagtggtcaggcaaagcc

SEQ ID NO: 10335 - DNA, 18 bp, synthetic construct
  source 1..18: mol_type = other DNA; mol_type = other DNA
caggtgtcaggcaaagcc

SEQ ID NO: 10336 - DNA, 18 bp, synthetic construct
  source 1..18: mol_type = other DNA; mol_type = other DNA
cagggttcaggcaaagcc

SEQ ID NO: 10337 - DNA, 18 bp, synthetic construct
  source 1..18: mol_type = other DNA; mol_type = other DNA
acatgggtcaggcaaagc

SEQ ID NO: 10338 - DNA, 18 bp, synthetic construct
  source 1..18: mol_type = other DNA; mol_type = other DNA
acagtggtcaggcaaagc

SEQ ID NO: 10339 - DNA, 18 bp, synthetic construct
  source 1..18: mol_type = other DNA; mol_type = other DNA
acaggtgtcaggcaaagc

SEQ ID NO: 10340 - DNA, 18 bp, synthetic construct
  source 1..18: mol_type = other DNA; mol_type = other DNA
acagggttcaggcaaagc

SEQ ID NO: 10341 - DNA, 18 bp, synthetic construct
  source 1..18: mol_type = other DNA; mol_type = other DNA
gacatgggtcaggcaaag

SEQ ID NO: 10342 - DNA, 18 bp, synthetic construct
  source 1..18: mol_type = other DNA; mol_type = other DNA
gacagtggtcaggcaaag

SEQ ID NO: 10343 - DNA, 18 bp, synthetic construct
  source 1..18: mol_type = other DNA; mol_type = other DNA
gacaggtgtcaggcaaag

SEQ ID NO: 10344 - DNA, 18 bp, synthetic construct
  source 1..18: mol_type = other DNA; mol_type = other DNA
gacagggttcaggcaaag

SEQ ID NO: 10345 - DNA, 18 bp, synthetic construct
  source 1..18: mol_type = other DNA; mol_type = other DNA
agacatgggtcaggcaaa

SEQ ID NO: 10346 - DNA, 18 bp, synthetic construct
  source 1..18: mol_type = other DNA; mol_type = other DNA
agacagtggtcaggcaaa

SEQ ID NO: 10347 - DNA, 18 bp, synthetic construct
  source 1..18: mol_type = other DNA; mol_type = other DNA
agacaggtgtcaggcaaa

SEQ ID NO: 10348 - DNA, 18 bp, synthetic construct
  source 1..18: mol_type = other DNA; mol_type = other DNA
agacagggttcaggcaaa

SEQ ID NO: 10349 - DNA, 18 bp, synthetic construct
  source 1..18: mol_type = other DNA; mol_type = other DNA
cagacatgggtcaggcaa

SEQ ID NO: 10350 - DNA, 18 bp, synthetic construct
  source 1..18: mol_type = other DNA; mol_type = other DNA
cagacagtggtcaggcaa

SEQ ID NO: 10351 - DNA, 18 bp, synthetic construct
  source 1..18: mol_type = other DNA; mol_type = other DNA
cagacaggtgtcaggcaa

SEQ ID NO: 10352 - DNA, 18 bp, synthetic construct
  source 1..18: mol_type = other DNA; mol_type = other DNA
cagacagggttcaggcaa

SEQ ID NO: 10353 - DNA, 18 bp, synthetic construct
  source 1..18: mol_type = other DNA; mol_type = other DNA
ccagacatgggtcaggca

SEQ ID NO: 10354 - DNA, 18 bp, synthetic construct
  source 1..18: mol_type = other DNA; mol_type = other DNA
ccagacagtggtcaggca

SEQ ID NO: 10355 - DNA, 18 bp, synthetic construct
  source 1..18: mol_type = other DNA; mol_type = other DNA
ccagacaggtgtcaggca

SEQ ID NO: 10356 - DNA, 18 bp, synthetic construct
  source 1..18: mol_type = other DNA; mol_type = other DNA
ccagacagggttcaggca

SEQ ID NO: 10357 - DNA, 18 bp, synthetic construct
  source 1..18: mol_type = other DNA; mol_type = other DNA
cccagacatgggtcaggc

SEQ ID NO: 10358 - DNA, 18 bp, synthetic construct
  source 1..18: mol_type = other DNA; mol_type = other DNA
cccagacagtggtcaggc

SEQ ID NO: 10359 - DNA, 18 bp, synthetic construct
  source 1..18: mol_type = other DNA; mol_type = other DNA
cccagacaggtgtcaggc

SEQ ID NO: 10360 - DNA, 18 bp, synthetic construct
  source 1..18: mol_type = other DNA; mol_type = other DNA
cccagacagggttcaggc

SEQ ID NO: 10361 - DNA, 18 bp, synthetic construct
  source 1..18: mol_type = other DNA; mol_type = other DNA
ccccagacatgggtcagg

SEQ ID NO: 10362 - DNA, 18 bp, synthetic construct
  source 1..18: mol_type = other DNA; mol_type = other DNA
ccccagacagtggtcagg

SEQ ID NO: 10363 - DNA, 18 bp, synthetic construct
  source 1..18: mol_type = other DNA; mol_type = other DNA
ccccagacaggtgtcagg

SEQ ID NO: 10364 - DNA, 18 bp, synthetic construct
  source 1..18: mol_type = other DNA; mol_type = other DNA
ccccagacagggttcagg

SEQ ID NO: 10365 - DNA, 18 bp, synthetic construct
  source 1..18: mol_type = other DNA; mol_type = other DNA
cccccagacatgggtcag

SEQ ID NO: 10366 - DNA, 18 bp, synthetic construct
  source 1..18: mol_type = other DNA; mol_type = other DNA
cccccagacagtggtcag

SEQ ID NO: 10367 - DNA, 18 bp, synthetic construct
  source 1..18: mol_type = other DNA; mol_type = other DNA
cccccagacaggtgtcag

SEQ ID NO: 10368 - DNA, 18 bp, synthetic construct
  source 1..18: mol_type = other DNA; mol_type = other DNA
cccccagacagggttcag

SEQ ID NO: 10369 - DNA, 18 bp, synthetic construct
  source 1..18: mol_type = other DNA; mol_type = other DNA
tcccccagacagggatca

SEQ ID NO: 10370 - DNA, 18 bp, synthetic construct
  source 1..18: mol_type = other DNA; mol_type = other DNA
tcccccagacatgggtca

SEQ ID NO: 10371 - DNA, 18 bp, synthetic construct
  source 1..18: mol_type = other DNA; mol_type = other DNA
tcccccagacagtggtca

SEQ ID NO: 10372 - DNA, 18 bp, synthetic construct
  source 1..18: mol_type = other DNA; mol_type = other DNA
tcccccagacaggtgtca

SEQ ID NO: 10373 - DNA, 18 bp, synthetic construct
  source 1..18: mol_type = other DNA; mol_type = other DNA
tcccccagacagggttca

SEQ ID NO: 10374 - DNA, 18 bp, synthetic construct
  source 1..18: mol_type = other DNA; mol_type = other DNA
ctcccccagacagggatc

SEQ ID NO: 10375 - DNA, 18 bp, synthetic construct
  source 1..18: mol_type = other DNA; mol_type = other DNA
ctcccccagacatgggtc

SEQ ID NO: 10376 - DNA, 18 bp, synthetic construct
  source 1..18: mol_type = other DNA; mol_type = other DNA
ctcccccagacagtggtc

SEQ ID NO: 10377 - DNA, 18 bp, synthetic construct
  source 1..18: mol_type = other DNA; mol_type = other DNA
ctcccccagacaggtgtc

SEQ ID NO: 10378 - DNA, 18 bp, synthetic construct
  source 1..18: mol_type = other DNA; mol_type = other DNA
ctcccccagacagggttc

SEQ ID NO: 10379 - DNA, 18 bp, synthetic construct
  source 1..18: mol_type = other DNA; mol_type = other DNA
actcccccagacagggat

SEQ ID NO: 10380 - DNA, 18 bp, synthetic construct
  source 1..18: mol_type = other DNA; mol_type = other DNA
cactcccccagacaggga

SEQ ID NO: 10381 - DNA, 18 bp, synthetic construct
  source 1..18: mol_type = other DNA; mol_type = other DNA
actcccccagacatgggt

SEQ ID NO: 10382 - DNA, 18 bp, synthetic construct
  source 1..18: mol_type = other DNA; mol_type = other DNA
actcccccagacagtggt

SEQ ID NO: 10383 - DNA, 18 bp, synthetic construct
  source 1..18: mol_type = other DNA; mol_type = other DNA
actcccccagacaggtgt

SEQ ID NO: 10384 - DNA, 18 bp, synthetic construct
  source 1..18: mol_type = other DNA; mol_type = other DNA
actcccccagacagggtt

SEQ ID NO: 10385 - DNA, 18 bp, synthetic construct
  source 1..18: mol_type = other DNA; mol_type = other DNA
gcactcccccagacaggg

SEQ ID NO: 10386 - DNA, 18 bp, synthetic construct
  source 1..18: mol_type = other DNA; mol_type = other DNA
gcactcccccagacagga

SEQ ID NO: 10387 - DNA, 18 bp, synthetic construct
  source 1..18: mol_type = other DNA; mol_type = other DNA
agcactcccccagacagg

SEQ ID NO: 10388 - DNA, 18 bp, synthetic construct
  source 1..18: mol_type = other DNA; mol_type = other DNA
agcactcccccagacaga

SEQ ID NO: 10389 - DNA, 18 bp, synthetic construct
  source 1..18: mol_type = other DNA; mol_type = other DNA
cagcactcccccagacag

SEQ ID NO: 10390 - DNA, 18 bp, synthetic construct
  source 1..18: mol_type = other DNA; mol_type = other DNA
cagcactcccccagacaa

SEQ ID NO: 10391 - DNA, 18 bp, synthetic construct
  source 1..18: mol_type = other DNA; mol_type = other DNA
ccagcactcccccagaca

SEQ ID NO: 10392 - DNA, 18 bp, synthetic construct
  source 1..18: mol_type = other DNA; mol_type = other DNA
ccagcactcccccaaaca

SEQ ID NO: 10393 - DNA, 18 bp, synthetic construct
  source 1..18: mol_type = other DNA; mol_type = other DNA
accagcactcccccagac

SEQ ID NO: 10394 - DNA, 18 bp, synthetic construct
  source 1..18: mol_type = other DNA; mol_type = other DNA
accagcactcccccaaac

SEQ ID NO: 10395 - DNA, 18 bp, synthetic construct
  source 1..18: mol_type = other DNA; mol_type = other DNA
caccagcactcccccaga

SEQ ID NO: 10396 - DNA, 18 bp, synthetic construct
  source 1..18: mol_type = other DNA; mol_type = other DNA
caccagcactcccccaaa

SEQ ID NO: 10397 - DNA, 18 bp, synthetic construct
  source 1..18: mol_type = other DNA; mol_type = other DNA
acaccagcactcccccag

SEQ ID NO: 10398 - DNA, 18 bp, synthetic construct
  source 1..18: mol_type = other DNA; mol_type = other DNA
acaccagcactcccccaa

SEQ ID NO: 10399 - DNA, 18 bp, synthetic construct
  source 1..18: mol_type = other DNA; mol_type = other DNA
cacaccagcactccccca

SEQ ID NO: 10400 - DNA, 18 bp, synthetic construct
  source 1..18: mol_type = other DNA; mol_type = other DNA
cacaccaacactccccca

SEQ ID NO: 10401 - DNA, 18 bp, synthetic construct
  source 1..18: mol_type = other DNA; mol_type = other DNA
acacaccagcactccccc

SEQ ID NO: 10402 - DNA, 18 bp, synthetic construct
  source 1..18: mol_type = other DNA; mol_type = other DNA
acacaccaacactccccc

SEQ ID NO: 10403 - DNA, 18 bp, synthetic construct
  source 1..18: mol_type = other DNA; mol_type = other DNA
cacacaccagcactcccc

SEQ ID NO: 10404 - DNA, 18 bp, synthetic construct
  source 1..18: mol_type = other DNA; mol_type = other DNA
cacacaccaacactcccc

SEQ ID NO: 10405 - DNA, 18 bp, synthetic construct
  source 1..18: mol_type = other DNA; mol_type = other DNA
tcacacaccagcactccc

SEQ ID NO: 10406 - DNA, 18 bp, synthetic construct
  source 1..18: mol_type = other DNA; mol_type = other DNA
tcacacaccaacactccc

SEQ ID NO: 10407 - DNA, 18 bp, synthetic construct
  source 1..18: mol_type = other DNA; mol_type = other DNA
ctcacacaccagcactcc

SEQ ID NO: 10408 - DNA, 18 bp, synthetic construct
  source 1..18: mol_type = other DNA; mol_type = other DNA
ctcacacaccaacactcc

SEQ ID NO: 10409 - DNA, 18 bp, synthetic construct
  source 1..18: mol_type = other DNA; mol_type = other DNA
cctcacacaccagcactc

SEQ ID NO: 10410 - DNA, 18 bp, synthetic construct
  source 1..18: mol_type = other DNA; mol_type = other DNA
cctcacacaccaacactc

SEQ ID NO: 10411 - DNA, 18 bp, synthetic construct
  source 1..18: mol_type = other DNA; mol_type = other DNA
tcctcacacaccagcact

SEQ ID NO: 10412 - DNA, 18 bp, synthetic construct
  source 1..18: mol_type = other DNA; mol_type = other DNA
tcctcacacaccaacact

SEQ ID NO: 10413 - DNA, 18 bp, synthetic construct
  source 1..18: mol_type = other DNA; mol_type = other DNA
ctcctcacacaccagcac

SEQ ID NO: 10414 - DNA, 18 bp, synthetic construct
  source 1..18: mol_type = other DNA; mol_type = other DNA
ctcctcacacaccaacac

SEQ ID NO: 10415 - DNA, 18 bp, synthetic construct
  source 1..18: mol_type = other DNA; mol_type = other DNA
cctcctcacacaccagca

SEQ ID NO: 10416 - DNA, 18 bp, synthetic construct
  source 1..18: mol_type = other DNA; mol_type = other DNA
cctcctcacacaccaaca

SEQ ID NO: 10417 - DNA, 18 bp, synthetic construct
  source 1..18: mol_type = other DNA; mol_type = other DNA
acctcctcacacaccagc

SEQ ID NO: 10418 - DNA, 18 bp, synthetic construct
  source 1..18: mol_type = other DNA; mol_type = other DNA
acctcctcacacaccaac

SEQ ID NO: 10419 - DNA, 18 bp, synthetic construct
  source 1..18: mol_type = other DNA; mol_type = other DNA
aacctcctcacacaccag

SEQ ID NO: 10420 - DNA, 18 bp, synthetic construct
  source 1..18: mol_type = other DNA; mol_type = other DNA
aacctcctcacacaccaa

SEQ ID NO: 10421 - DNA, 18 bp, synthetic construct
  source 1..18: mol_type = other DNA; mol_type = other DNA
gaacctcctcacacacca

SEQ ID NO: 10422 - DNA, 18 bp, synthetic construct
  source 1..18: mol_type = other DNA; mol_type = other DNA
aaacctcctcacacacca

SEQ ID NO: 10423 - DNA, 18 bp, synthetic construct
  source 1..18: mol_type = other DNA; mol_type = other DNA
ggaacctcctcacacacc

SEQ ID NO: 10424 - DNA, 18 bp, synthetic construct
  source 1..18: mol_type = other DNA; mol_type = other DNA
gaaacctcctcacacacc

SEQ ID NO: 10425 - DNA, 18 bp, synthetic construct
  source 1..18: mol_type = other DNA; mol_type = other DNA
tggaacctcctcacacac

SEQ ID NO: 10426 - DNA, 18 bp, synthetic construct
  source 1..18: mol_type = other DNA; mol_type = other DNA
tgaaacctcctcacacac

SEQ ID NO: 10427 - DNA, 18 bp, synthetic construct
  source 1..18: mol_type = other DNA; mol_type = other DNA
ctggaacctcctcacaca

SEQ ID NO: 10428 - DNA, 18 bp, synthetic construct
  source 1..18: mol_type = other DNA; mol_type = other DNA
ctgaaacctcctcacaca

SEQ ID NO: 10429 - DNA, 18 bp, synthetic construct
  source 1..18: mol_type = other DNA; mol_type = other DNA
gctggaacctcctcacac

SEQ ID NO: 10430 - DNA, 18 bp, synthetic construct
  source 1..18: mol_type = other DNA; mol_type = other DNA
gctgaaacctcctcacac

SEQ ID NO: 10431 - DNA, 18 bp, synthetic construct
  source 1..18: mol_type = other DNA; mol_type = other DNA
cgctggaacctcctcaca

SEQ ID NO: 10432 - DNA, 18 bp, synthetic construct
  source 1..18: mol_type = other DNA; mol_type = other DNA
cgctgaaacctcctcaca

SEQ ID NO: 10433 - DNA, 18 bp, synthetic construct
  source 1..18: mol_type = other DNA; mol_type = other DNA
gcgctggaacctcctcac

SEQ ID NO: 10434 - DNA, 18 bp, synthetic construct
  source 1..18: mol_type = other DNA; mol_type = other DNA
gcgctgaaacctcctcac

SEQ ID NO: 10435 - DNA, 18 bp, synthetic construct
  source 1..18: mol_type = other DNA; mol_type = other DNA
tgcgctggaacctcctca

SEQ ID NO: 10436 - DNA, 18 bp, synthetic construct
  source 1..18: mol_type = other DNA; mol_type = other DNA
tgcgctgaaacctcctca

SEQ ID NO: 10437 - DNA, 18 bp, synthetic construct
  source 1..18: mol_type = other DNA; mol_type = other DNA
ttgcgctggaacctcctc

SEQ ID NO: 10438 - DNA, 18 bp, synthetic construct
  source 1..18: mol_type = other DNA; mol_type = other DNA
ttgcgctgaaacctcctc

SEQ ID NO: 10439 - DNA, 18 bp, synthetic construct
  source 1..18: mol_type = other DNA; mol_type = other DNA
cttgcgctggaacctcct

SEQ ID NO: 10440 - DNA, 18 bp, synthetic construct
  source 1..18: mol_type = other DNA; mol_type = other DNA
cttgcgctgaaacctcct

SEQ ID NO: 10441 - DNA, 18 bp, synthetic construct
  source 1..18: mol_type = other DNA; mol_type = other DNA
acttgcgctggaacctcc

SEQ ID NO: 10442 - DNA, 18 bp, synthetic construct
  source 1..18: mol_type = other DNA; mol_type = other DNA
acttgcgctgaaacctcc

SEQ ID NO: 10443 - DNA, 18 bp, synthetic construct
  source 1..18: mol_type = other DNA; mol_type = other DNA
gacttgcgctggaacctc

SEQ ID NO: 10444 - DNA, 18 bp, synthetic construct
  source 1..18: mol_type = other DNA; mol_type = other DNA
gacttgcgctgaaacctc

SEQ ID NO: 10445 - DNA, 18 bp, synthetic construct
  source 1..18: mol_type = other DNA; mol_type = other DNA
tgacttgcgctggaacct

SEQ ID NO: 10446 - DNA, 18 bp, synthetic construct
  source 1..18: mol_type = other DNA; mol_type = other DNA
tgacttgcgctgaaacct

SEQ ID NO: 10447 - DNA, 18 bp, synthetic construct
  source 1..18: mol_type = other DNA; mol_type = other DNA
ctgacttgcgctggaacc

SEQ ID NO: 10448 - DNA, 18 bp, synthetic construct
  source 1..18: mol_type = other DNA; mol_type = other DNA
ctgacttgcgctgaaacc

SEQ ID NO: 10449 - DNA, 18 bp, synthetic construct
  source 1..18: mol_type = other DNA; mol_type = other DNA
cctgacttgcgctggaac

SEQ ID NO: 10450 - DNA, 18 bp, synthetic construct
  source 1..18: mol_type = other DNA; mol_type = other DNA
cctgacttgcgctgaaac

SEQ ID NO: 10451 - DNA, 18 bp, synthetic construct
  source 1..18: mol_type = other DNA; mol_type = other DNA
ccctgacttgcgctggaa

SEQ ID NO: 10452 - DNA, 18 bp, synthetic construct
  source 1..18: mol_type = other DNA; mol_type = other DNA
ccctgacttgcgctgaaa

SEQ ID NO: 10453 - DNA, 18 bp, synthetic construct
  source 1..18: mol_type = other DNA; mol_type = other DNA
accctgacttgcgctgga

SEQ ID NO: 10454 - DNA, 18 bp, synthetic construct
  source 1..18: mol_type = other DNA; mol_type = other DNA
accctgacttgcgctgaa

SEQ ID NO: 10455 - DNA, 18 bp, synthetic construct
  source 1..18: mol_type = other DNA; mol_type = other DNA
caccctgacttgcgctgg

SEQ ID NO: 10456 - DNA, 18 bp, synthetic construct
  source 1..18: mol_type = other DNA; mol_type = other DNA
caccctgacttgcgctga

SEQ ID NO: 10457 - DNA, 18 bp, synthetic construct
  source 1..18: mol_type = other DNA; mol_type = other DNA
ccaccctgacttgcgctg

SEQ ID NO: 10458 - DNA, 18 bp, synthetic construct
  source 1..18: mol_type = other DNA; mol_type = other DNA
ccaccctgacttgcgcta

SEQ ID NO: 10459 - DNA, 18 bp, synthetic construct
  source 1..18: mol_type = other DNA; mol_type = other DNA
gccaccctgacttgcgct

SEQ ID NO: 10460 - DNA, 18 bp, synthetic construct
  source 1..18: mol_type = other DNA; mol_type = other DNA
gccaccctgacttgcact

SEQ ID NO: 10461 - DNA, 18 bp, synthetic construct
  source 1..18: mol_type = other DNA; mol_type = other DNA
ggccaccctgacttgcgc

SEQ ID NO: 10462 - DNA, 18 bp, synthetic construct
  source 1..18: mol_type = other DNA; mol_type = other DNA
ggccaccctgacttgcac

SEQ ID NO: 10463 - DNA, 18 bp, synthetic construct
  source 1..18: mol_type = other DNA; mol_type = other DNA
cgctaatctcggcgggtg

SEQ ID NO: 10464 - DNA, 18 bp, synthetic construct
  source 1..18: mol_type = other DNA; mol_type = other DNA
cgctaatctcggcgggta

SEQ ID NO: 10465 - DNA, 18 bp, synthetic construct
  source 1..18: mol_type = other DNA; mol_type = other DNA
acgctaatctcggcgggt

SEQ ID NO: 10466 - DNA, 18 bp, synthetic construct
  source 1..18: mol_type = other DNA; mol_type = other DNA
acgctaatctcggcggat

SEQ ID NO: 10467 - DNA, 18 bp, synthetic construct
  source 1..18: mol_type = other DNA; mol_type = other DNA
tacgctaatctcggcggg

SEQ ID NO: 10468 - DNA, 18 bp, synthetic construct
  source 1..18: mol_type = other DNA; mol_type = other DNA
tacgctaatctcggcgga

SEQ ID NO: 10469 - DNA, 18 bp, synthetic construct
  source 1..18: mol_type = other DNA; mol_type = other DNA
ttacgctaatctcggcgg

SEQ ID NO: 10470 - DNA, 18 bp, synthetic construct
  source 1..18: mol_type = other DNA; mol_type = other DNA
ttacgctaatctcggcga

SEQ ID NO: 10471 - DNA, 18 bp, synthetic construct
  source 1..18: mol_type = other DNA; mol_type = other DNA
cttacgctaatctcggcg

SEQ ID NO: 10472 - DNA, 18 bp, synthetic construct
  source 1..18: mol_type = other DNA; mol_type = other DNA
cttacgctaatctcggca

SEQ ID NO: 10473 - DNA, 18 bp, synthetic construct
  source 1..18: mol_type = other DNA; mol_type = other DNA
ccttacgctaatctcggc

SEQ ID NO: 10474 - DNA, 18 bp, synthetic construct
  source 1..18: mol_type = other DNA; mol_type = other DNA
ccttacgctaatctcgac

SEQ ID NO: 10475 - DNA, 18 bp, synthetic construct
  source 1..18: mol_type = other DNA; mol_type = other DNA
cccttacgctaatctcgg

SEQ ID NO: 10476 - DNA, 18 bp, synthetic construct
  source 1..18: mol_type = other DNA; mol_type = other DNA
cccttacgctaatctcga

SEQ ID NO: 10477 - DNA, 18 bp, synthetic construct
  source 1..18: mol_type = other DNA; mol_type = other DNA
gcccttacgctaatctcg

SEQ ID NO: 10478 - DNA, 18 bp, synthetic construct
  source 1..18: mol_type = other DNA; mol_type = other DNA
gcccttacgctaatctca

SEQ ID NO: 10479 - DNA, 18 bp, synthetic construct
  source 1..18: mol_type = other DNA; mol_type = other DNA
ggcccttacgctaatctc

SEQ ID NO: 10480 - DNA, 18 bp, synthetic construct
  source 1..18: mol_type = other DNA; mol_type = other DNA
ggcccttacactaatctc

SEQ ID NO: 10481 - DNA, 18 bp, synthetic construct
  source 1..18: mol_type = other DNA; mol_type = other DNA
tggcccttacgctaatct

SEQ ID NO: 10482 - DNA, 18 bp, synthetic construct
  source 1..18: mol_type = other DNA; mol_type = other DNA
tggcccttacactaatct

SEQ ID NO: 10483 - DNA, 18 bp, synthetic construct
  source 1..18: mol_type = other DNA; mol_type = other DNA
gtggcccttacgctaatc

SEQ ID NO: 10484 - DNA, 18 bp, synthetic construct
  source 1..18: mol_type = other DNA; mol_type = other DNA
gtggcccttacactaatc

SEQ ID NO: 10485 - DNA, 18 bp, synthetic construct
  source 1..18: mol_type = other DNA; mol_type = other DNA
cgtggcccttacgctaat

SEQ ID NO: 10486 - DNA, 18 bp, synthetic construct
  source 1..18: mol_type = other DNA; mol_type = other DNA
cgtggcccttacactaat

SEQ ID NO: 10487 - DNA, 18 bp, synthetic construct
  source 1..18: mol_type = other DNA; mol_type = other DNA
ccgtggcccttacgctaa

SEQ ID NO: 10488 - DNA, 18 bp, synthetic construct
  source 1..18: mol_type = other DNA; mol_type = other DNA
ccgtggcccttacactaa

SEQ ID NO: 10489 - DNA, 18 bp, synthetic construct
  source 1..18: mol_type = other DNA; mol_type = other DNA
cccgtggcccttacgcta

SEQ ID NO: 10490 - DNA, 18 bp, synthetic construct
  source 1..18: mol_type = other DNA; mol_type = other DNA
cccgtggcccttacacta

SEQ ID NO: 10491 - DNA, 18 bp, synthetic construct
  source 1..18: mol_type = other DNA; mol_type = other DNA
gcccgtggcccttacgct

SEQ ID NO: 10492 - DNA, 18 bp, synthetic construct
  source 1..18: mol_type = other DNA; mol_type = other DNA
gcccgtggcccttacact

SEQ ID NO: 10493 - DNA, 18 bp, synthetic construct
  source 1..18: mol_type = other DNA; mol_type = other DNA
cgcccgtggcccttacgc

SEQ ID NO: 10494 - DNA, 18 bp, synthetic construct
  source 1..18: mol_type = other DNA; mol_type = other DNA
cgcccgtggcccttacac

SEQ ID NO: 10495 - DNA, 18 bp, synthetic construct
  source 1..18: mol_type = other DNA; mol_type = other DNA
ccgcccgtggcccttacg

SEQ ID NO: 10496 - DNA, 18 bp, synthetic construct
  source 1..18: mol_type = other DNA; mol_type = other DNA
ccgcccgtggcccttaca

SEQ ID NO: 10497 - DNA, 18 bp, synthetic construct
  source 1..18: mol_type = other DNA; mol_type = other DNA
gccgcccgtggcccttac

SEQ ID NO: 10498 - DNA, 18 bp, synthetic construct
  source 1..18: mol_type = other DNA; mol_type = other DNA
gccgcccgtgacccttac

SEQ ID NO: 10499 - DNA, 18 bp, synthetic construct
  source 1..18: mol_type = other DNA; mol_type = other DNA
agccgcccgtggccctta

SEQ ID NO: 10500 - DNA, 18 bp, synthetic construct
  source 1..18: mol_type = other DNA; mol_type = other DNA
agccgcccgtgaccctta

SEQ ID NO: 10501 - DNA, 18 bp, synthetic construct
  source 1..18: mol_type = other DNA; mol_type = other DNA
cagccgcccgtggccctt

SEQ ID NO: 10502 - DNA, 18 bp, synthetic construct
  source 1..18: mol_type = other DNA; mol_type = other DNA
cagccgcccgtgaccctt

SEQ ID NO: 10503 - DNA, 18 bp, synthetic construct
  source 1..18: mol_type = other DNA; mol_type = other DNA
ccagccgcccgtggccct

SEQ ID NO: 10504 - DNA, 18 bp, synthetic construct
  source 1..18: mol_type = other DNA; mol_type = other DNA
ccagccgcccgtgaccct

SEQ ID NO: 10505 - DNA, 18 bp, synthetic construct
  source 1..18: mol_type = other DNA; mol_type = other DNA
cccagccgcccgtggccc

SEQ ID NO: 10506 - DNA, 18 bp, synthetic construct
  source 1..18: mol_type = other DNA; mol_type = other DNA
cccagccgcccgtgaccc

SEQ ID NO: 10507 - DNA, 18 bp, synthetic construct
  source 1..18: mol_type = other DNA; mol_type = other DNA
tcccagccgcccgtggcc

SEQ ID NO: 10508 - DNA, 18 bp, synthetic construct
  source 1..18: mol_type = other DNA; mol_type = other DNA
tcccagccgcccgtgacc

SEQ ID NO: 10509 - DNA, 18 bp, synthetic construct
  source 1..18: mol_type = other DNA; mol_type = other DNA
ctcccagccgcccgtggc

SEQ ID NO: 10510 - DNA, 18 bp, synthetic construct
  source 1..18: mol_type = other DNA; mol_type = other DNA
ctcccagccgcccgtgac

SEQ ID NO: 10511 - DNA, 18 bp, synthetic construct
  source 1..18: mol_type = other DNA; mol_type = other DNA
gctcccagccgcccgtgg

SEQ ID NO: 10512 - DNA, 18 bp, synthetic construct
  source 1..18: mol_type = other DNA; mol_type = other DNA
gctcccagccgcccgtga

SEQ ID NO: 10513 - DNA, 18 bp, synthetic construct
  source 1..18: mol_type = other DNA; mol_type = other DNA
cgctcccagccgcccgtg

SEQ ID NO: 10514 - DNA, 18 bp, synthetic construct
  source 1..18: mol_type = other DNA; mol_type = other DNA
cgctcccagccgcccgta

SEQ ID NO: 10515 - DNA, 18 bp, synthetic construct
  source 1..18: mol_type = other DNA; mol_type = other DNA
gcgctcccagccgcccgt

SEQ ID NO: 10516 - DNA, 18 bp, synthetic construct
  source 1..18: mol_type = other DNA; mol_type = other DNA
gcgctcccagccgcccat

SEQ ID NO: 10517 - DNA, 18 bp, synthetic construct
  source 1..18: mol_type = other DNA; mol_type = other DNA
agcgctcccagccgcccg

SEQ ID NO: 10518 - DNA, 18 bp, synthetic construct
  source 1..18: mol_type = other DNA; mol_type = other DNA
agcgctcccagccgccca

SEQ ID NO: 10519 - DNA, 18 bp, synthetic construct
  source 1..18: mol_type = other DNA; mol_type = other DNA
cagcgctcccagccgccc

SEQ ID NO: 10520 - DNA, 18 bp, synthetic construct
  source 1..18: mol_type = other DNA; mol_type = other DNA
cagcgctcccagccaccc

SEQ ID NO: 10521 - DNA, 18 bp, synthetic construct
  source 1..18: mol_type = other DNA; mol_type = other DNA
ccagcgctcccagccgcc

SEQ ID NO: 10522 - DNA, 18 bp, synthetic construct
  source 1..18: mol_type = other DNA; mol_type = other DNA
ccagcgctcccagccacc

SEQ ID NO: 10523 - DNA, 18 bp, synthetic construct
  source 1..18: mol_type = other DNA; mol_type = other DNA
cccagcgctcccagccgc

SEQ ID NO: 10524 - DNA, 18 bp, synthetic construct
  source 1..18: mol_type = other DNA; mol_type = other DNA
cccagcgctcccagccac

SEQ ID NO: 10525 - DNA, 18 bp, synthetic construct
  source 1..18: mol_type = other DNA; mol_type = other DNA
acccagcgctcccagccg

SEQ ID NO: 10526 - DNA, 18 bp, synthetic construct
  source 1..18: mol_type = other DNA; mol_type = other DNA
acccagcgctcccagcca

SEQ ID NO: 10527 - DNA, 18 bp, synthetic construct
  source 1..18: mol_type = other DNA; mol_type = other DNA
gacccagcgctcccagcc

SEQ ID NO: 10528 - DNA, 18 bp, synthetic construct
  source 1..18: mol_type = other DNA; mol_type = other DNA
gacccagcgctcccaacc

SEQ ID NO: 10529 - DNA, 18 bp, synthetic construct
  source 1..18: mol_type = other DNA; mol_type = other DNA
cgacccagcgctcccagc

SEQ ID NO: 10530 - DNA, 18 bp, synthetic construct
  source 1..18: mol_type = other DNA; mol_type = other DNA
cgacccagcgctcccaac

SEQ ID NO: 10531 - DNA, 18 bp, synthetic construct
  source 1..18: mol_type = other DNA; mol_type = other DNA
ccgacccagcgctcccag

SEQ ID NO: 10532 - DNA, 18 bp, synthetic construct
  source 1..18: mol_type = other DNA; mol_type = other DNA
ccgacccagcgctcccaa

SEQ ID NO: 10533 - DNA, 18 bp, synthetic construct
  source 1..18: mol_type = other DNA; mol_type = other DNA
cccgacccagcgctccca

SEQ ID NO: 10534 - DNA, 18 bp, synthetic construct
  source 1..18: mol_type = other DNA; mol_type = other DNA
cccgacccagcactccca

SEQ ID NO: 10535 - DNA, 18 bp, synthetic construct
  source 1..18: mol_type = other DNA; mol_type = other DNA
gcccgacccagcgctccc

SEQ ID NO: 10536 - DNA, 18 bp, synthetic construct
  source 1..18: mol_type = other DNA; mol_type = other DNA
gcccgacccagcactccc

SEQ ID NO: 10537 - DNA, 18 bp, synthetic construct
  source 1..18: mol_type = other DNA; mol_type = other DNA
tgcccgacccagcgctcc

SEQ ID NO: 10538 - DNA, 18 bp, synthetic construct
  source 1..18: mol_type = other DNA; mol_type = other DNA
tgcccgacccagcactcc

SEQ ID NO: 10539 - DNA, 18 bp, synthetic construct
  source 1..18: mol_type = other DNA; mol_type = other DNA
ctgcccgacccagcgctc

SEQ ID NO: 10540 - DNA, 18 bp, synthetic construct
  source 1..18: mol_type = other DNA; mol_type = other DNA
ctgcccgacccagcactc

SEQ ID NO: 10541 - DNA, 18 bp, synthetic construct
  source 1..18: mol_type = other DNA; mol_type = other DNA
cctgcccgacccagcgct

SEQ ID NO: 10542 - DNA, 18 bp, synthetic construct
  source 1..18: mol_type = other DNA; mol_type = other DNA
cctgcccgacccagcact

SEQ ID NO: 10543 - DNA, 18 bp, synthetic construct
  source 1..18: mol_type = other DNA; mol_type = other DNA
gcctgcccgacccagcgc

SEQ ID NO: 10544 - DNA, 18 bp, synthetic construct
  source 1..18: mol_type = other DNA; mol_type = other DNA
gcctgcccgacccagcac

SEQ ID NO: 10545 - DNA, 18 bp, synthetic construct
  source 1..18: mol_type = other DNA; mol_type = other DNA
tgcctgcccgacccagcg

SEQ ID NO: 10546 - DNA, 18 bp, synthetic construct
  source 1..18: mol_type = other DNA; mol_type = other DNA
tgcctgcccgacccagca

SEQ ID NO: 10547 - DNA, 18 bp, synthetic construct
  source 1..18: mol_type = other DNA; mol_type = other DNA
atgcctgcccgacccagc

SEQ ID NO: 10548 - DNA, 18 bp, synthetic construct
  source 1..18: mol_type = other DNA; mol_type = other DNA
atgcctgcccgacccaac

SEQ ID NO: 10549 - DNA, 18 bp, synthetic construct
  source 1..18: mol_type = other DNA; mol_type = other DNA
catgcctgcccgacccag

SEQ ID NO: 10550 - DNA, 18 bp, synthetic construct
  source 1..18: mol_type = other DNA; mol_type = other DNA
catgcctgcccgacccaa

SEQ ID NO: 10551 - DNA, 18 bp, synthetic construct
  source 1..18: mol_type = other DNA; mol_type = other DNA
ccatgcctgcccgaccca

SEQ ID NO: 10552 - DNA, 18 bp, synthetic construct
  source 1..18: mol_type = other DNA; mol_type = other DNA
ccatgcctgcccaaccca

SEQ ID NO: 10553 - DNA, 18 bp, synthetic construct
  source 1..18: mol_type = other DNA; mol_type = other DNA
cccatgcctgcccgaccc

SEQ ID NO: 10554 - DNA, 18 bp, synthetic construct
  source 1..18: mol_type = other DNA; mol_type = other DNA
cccatgcctgcccaaccc

SEQ ID NO: 10555 - DNA, 18 bp, synthetic construct
  source 1..18: mol_type = other DNA; mol_type = other DNA
ccccatgcctgcccgacc

SEQ ID NO: 10556 - DNA, 18 bp, synthetic construct
  source 1..18: mol_type = other DNA; mol_type = other DNA
ccccatgcctgcccaacc

SEQ ID NO: 10557 - DNA, 18 bp, synthetic construct
  source 1..18: mol_type = other DNA; mol_type = other DNA
cccccatgcctgcccgac

SEQ ID NO: 10558 - DNA, 18 bp, synthetic construct
  source 1..18: mol_type = other DNA; mol_type = other DNA
cccccatgcctgcccaac

SEQ ID NO: 10559 - DNA, 18 bp, synthetic construct
  source 1..18: mol_type = other DNA; mol_type = other DNA
acccccatgcctgcccga

SEQ ID NO: 10560 - DNA, 18 bp, synthetic construct
  source 1..18: mol_type = other DNA; mol_type = other DNA
acccccatgcctgcccaa

SEQ ID NO: 10561 - DNA, 18 bp, synthetic construct
  source 1..18: mol_type = other DNA; mol_type = other DNA
gacccccatgcctgcccg

SEQ ID NO: 10562 - DNA, 18 bp, synthetic construct
  source 1..18: mol_type = other DNA; mol_type = other DNA
gacccccatgcctgccca

SEQ ID NO: 10563 - DNA, 18 bp, synthetic construct
  source 1..18: mol_type = other DNA; mol_type = other DNA
tgacccccatgcctgccc

SEQ ID NO: 10564 - DNA, 18 bp, synthetic construct
  source 1..18: mol_type = other DNA; mol_type = other DNA
tgacccccatgcctaccc

SEQ ID NO: 10565 - DNA, 18 bp, synthetic construct
  source 1..18: mol_type = other DNA; mol_type = other DNA
ctgacccccatgcctgcc

SEQ ID NO: 10566 - DNA, 18 bp, synthetic construct
  source 1..18: mol_type = other DNA; mol_type = other DNA
ctgacccccatgcctacc

SEQ ID NO: 10567 - DNA, 18 bp, synthetic construct
  source 1..18: mol_type = other DNA; mol_type = other DNA
tctgacccccatgcctgc

SEQ ID NO: 10568 - DNA, 18 bp, synthetic construct
  source 1..18: mol_type = other DNA; mol_type = other DNA
tctgacccccatgcctac

SEQ ID NO: 10569 - DNA, 18 bp, synthetic construct
  source 1..18: mol_type = other DNA; mol_type = other DNA
gtctgacccccatgcctg

SEQ ID NO: 10570 - DNA, 18 bp, synthetic construct
  source 1..18: mol_type = other DNA; mol_type = other DNA
gtctgacccccatgccta

SEQ ID NO: 10571 - DNA, 18 bp, synthetic construct
  source 1..18: mol_type = other DNA; mol_type = other DNA
agtctgacccccatgcct

SEQ ID NO: 10572 - DNA, 18 bp, synthetic construct
  source 1..18: mol_type = other DNA; mol_type = other DNA
agtctgacccccatacct

SEQ ID NO: 10573 - DNA, 18 bp, synthetic construct
  source 1..18: mol_type = other DNA; mol_type = other DNA
cagtctgacccccatgcc

SEQ ID NO: 10574 - DNA, 18 bp, synthetic construct
  source 1..18: mol_type = other DNA; mol_type = other DNA
cagtctgacccccatacc

SEQ ID NO: 10575 - DNA, 18 bp, synthetic construct
  source 1..18: mol_type = other DNA; mol_type = other DNA
acagtctgacccccatgc

SEQ ID NO: 10576 - DNA, 18 bp, synthetic construct
  source 1..18: mol_type = other DNA; mol_type = other DNA
acagtctgacccccatac

SEQ ID NO: 10577 - DNA, 18 bp, synthetic construct
  source 1..18: mol_type = other DNA; mol_type = other DNA
gacagtctgacccccatg

SEQ ID NO: 10578 - DNA, 18 bp, synthetic construct
  source 1..18: mol_type = other DNA; mol_type = other DNA
gacagtctgacccccata

SEQ ID NO: 10579 - DNA, 18 bp, synthetic construct
  source 1..18: mol_type = other DNA; mol_type = other DNA
ggacagtctgacccccat

SEQ ID NO: 10580 - DNA, 18 bp, synthetic construct
  source 1..18: mol_type = other DNA; mol_type = other DNA
ggacagtctaacccccat

SEQ ID NO: 10581 - DNA, 18 bp, synthetic construct
  source 1..18: mol_type = other DNA; mol_type = other DNA
aggacagtctgaccccca

SEQ ID NO: 10582 - DNA, 18 bp, synthetic construct
  source 1..18: mol_type = other DNA; mol_type = other DNA
aggacagtctaaccccca

SEQ ID NO: 10583 - DNA, 18 bp, synthetic construct
  source 1..18: mol_type = other DNA; mol_type = other DNA
caggacagtctgaccccc

SEQ ID NO: 10584 - DNA, 18 bp, synthetic construct
  source 1..18: mol_type = other DNA; mol_type = other DNA
caggacagtctaaccccc

SEQ ID NO: 10585 - DNA, 18 bp, synthetic construct
  source 1..18: mol_type = other DNA; mol_type = other DNA
ccaggacagtctgacccc

SEQ ID NO: 10586 - DNA, 18 bp, synthetic construct
  source 1..18: mol_type = other DNA; mol_type = other DNA
ccaggacagtctaacccc

SEQ ID NO: 10587 - DNA, 18 bp, synthetic construct
  source 1..18: mol_type = other DNA; mol_type = other DNA
cccaggacagtctgaccc

SEQ ID NO: 10588 - DNA, 18 bp, synthetic construct
  source 1..18: mol_type = other DNA; mol_type = other DNA
cccaggacagtctaaccc

SEQ ID NO: 10589 - DNA, 18 bp, synthetic construct
  source 1..18: mol_type = other DNA; mol_type = other DNA
gcccaggacagtctgacc

SEQ ID NO: 10590 - DNA, 18 bp, synthetic construct
  source 1..18: mol_type = other DNA; mol_type = other DNA
gcccaggacagtctaacc

SEQ ID NO: 10591 - DNA, 18 bp, synthetic construct
  source 1..18: mol_type = other DNA; mol_type = other DNA
ggcccaggacagtctgac

SEQ ID NO: 10592 - DNA, 18 bp, synthetic construct
  source 1..18: mol_type = other DNA; mol_type = other DNA
ggcccaggacagtctaac

SEQ ID NO: 10593 - DNA, 18 bp, synthetic construct
  source 1..18: mol_type = other DNA; mol_type = other DNA
gggcccaggacagtctga

SEQ ID NO: 10594 - DNA, 18 bp, synthetic construct
  source 1..18: mol_type = other DNA; mol_type = other DNA
gggcccaggacagtctaa

SEQ ID NO: 10595 - DNA, 18 bp, synthetic construct
  source 1..18: mol_type = other DNA; mol_type = other DNA
agggcccaggacagtctg

SEQ ID NO: 10596 - DNA, 18 bp, synthetic construct
  source 1..18: mol_type = other DNA; mol_type = other DNA
agggcccaggacagtcta

SEQ ID NO: 10597 - DNA, 18 bp, synthetic construct
  source 1..18: mol_type = other DNA; mol_type = other DNA
gagggcccaggacagtct

SEQ ID NO: 10598 - DNA, 18 bp, synthetic construct
  source 1..18: mol_type = other DNA; mol_type = other DNA
gagggcccaggacaatct

SEQ ID NO: 10599 - DNA, 18 bp, synthetic construct
  source 1..18: mol_type = other DNA; mol_type = other DNA
agagggcccaggacagtc

SEQ ID NO: 10600 - DNA, 18 bp, synthetic construct
  source 1..18: mol_type = other DNA; mol_type = other DNA
agagggcccaggacaatc

SEQ ID NO: 10601 - DNA, 18 bp, synthetic construct
  source 1..18: mol_type = other DNA; mol_type = other DNA
aagagggcccaggacagt

SEQ ID NO: 10602 - DNA, 18 bp, synthetic construct
  source 1..18: mol_type = other DNA; mol_type = other DNA
aagagggcccaggacaat

SEQ ID NO: 10603 - DNA, 18 bp, synthetic construct
  source 1..18: mol_type = other DNA; mol_type = other DNA
caagagggcccaggacag

SEQ ID NO: 10604 - DNA, 18 bp, synthetic construct
  source 1..18: mol_type = other DNA; mol_type = other DNA
caagagggcccaggacaa

SEQ ID NO: 10605 - DNA, 18 bp, synthetic construct
  source 1..18: mol_type = other DNA; mol_type = other DNA
tcaagagggcccaggaca

SEQ ID NO: 10606 - DNA, 18 bp, synthetic construct
  source 1..18: mol_type = other DNA; mol_type = other DNA
tcaagagggcccagaaca

SEQ ID NO: 10607 - DNA, 18 bp, synthetic construct
  source 1..18: mol_type = other DNA; mol_type = other DNA
gtcaagagggcccaggac

SEQ ID NO: 10608 - DNA, 18 bp, synthetic construct
  source 1..18: mol_type = other DNA; mol_type = other DNA
gtcaagagggcccagaac

SEQ ID NO: 10609 - DNA, 18 bp, synthetic construct
  source 1..18: mol_type = other DNA; mol_type = other DNA
cgtcaagagggcccagga

SEQ ID NO: 10610 - DNA, 18 bp, synthetic construct
  source 1..18: mol_type = other DNA; mol_type = other DNA
cgtcaagagggcccagaa

SEQ ID NO: 10611 - DNA, 18 bp, synthetic construct
  source 1..18: mol_type = other DNA; mol_type = other DNA
ccgtcaagagggcccagg

SEQ ID NO: 10612 - DNA, 18 bp, synthetic construct
  source 1..18: mol_type = other DNA; mol_type = other DNA
ccgtcaagagggcccaga

SEQ ID NO: 10613 - DNA, 18 bp, synthetic construct
  source 1..18: mol_type = other DNA; mol_type = other DNA
tccgtcaagagggcccag

SEQ ID NO: 10614 - DNA, 18 bp, synthetic construct
  source 1..18: mol_type = other DNA; mol_type = other DNA
tccgtcaagagggcccaa

SEQ ID NO: 10615 - DNA, 18 bp, synthetic construct
  source 1..18: mol_type = other DNA; mol_type = other DNA
ctccgtcaagagggccca

SEQ ID NO: 10616 - DNA, 18 bp, synthetic construct
  source 1..18: mol_type = other DNA; mol_type = other DNA
ctccgtcaagaggaccca

SEQ ID NO: 10617 - DNA, 18 bp, synthetic construct
  source 1..18: mol_type = other DNA; mol_type = other DNA
cctccgtcaagagggccc

SEQ ID NO: 10618 - DNA, 18 bp, synthetic construct
  source 1..18: mol_type = other DNA; mol_type = other DNA
cctccgtcaagaggaccc

SEQ ID NO: 10619 - DNA, 18 bp, synthetic construct
  source 1..18: mol_type = other DNA; mol_type = other DNA
acctccgtcaagagggcc

SEQ ID NO: 10620 - DNA, 18 bp, synthetic construct
  source 1..18: mol_type = other DNA; mol_type = other DNA
acctccgtcaagaggacc

SEQ ID NO: 10621 - DNA, 18 bp, synthetic construct
  source 1..18: mol_type = other DNA; mol_type = other DNA
cacctccgtcaagagggc

SEQ ID NO: 10622 - DNA, 18 bp, synthetic construct
  source 1..18: mol_type = other DNA; mol_type = other DNA
cacctccgtcaagaggac

SEQ ID NO: 10623 - DNA, 18 bp, synthetic construct
  source 1..18: mol_type = other DNA; mol_type = other DNA
tcacctccgtcaagaggg

SEQ ID NO: 10624 - DNA, 18 bp, synthetic construct
  source 1..18: mol_type = other DNA; mol_type = other DNA
tcacctccgtcaagagga

SEQ ID NO: 10625 - DNA, 18 bp, synthetic construct
  source 1..18: mol_type = other DNA; mol_type = other DNA
ctcacctccgtcaagagg

SEQ ID NO: 10626 - DNA, 18 bp, synthetic construct
  source 1..18: mol_type = other DNA; mol_type = other DNA
ctcacctccgtcaagaga

SEQ ID NO: 10627 - DNA, 18 bp, synthetic construct
  source 1..18: mol_type = other DNA; mol_type = other DNA
tctcacctccgtcaagag

SEQ ID NO: 10628 - DNA, 18 bp, synthetic construct
  source 1..18: mol_type = other DNA; mol_type = other DNA
tctcacctccgtcaagaa

SEQ ID NO: 10629 - DNA, 18 bp, synthetic construct
  source 1..18: mol_type = other DNA; mol_type = other DNA
ctctcacctccgtcaaga

SEQ ID NO: 10630 - DNA, 18 bp, synthetic construct
  source 1..18: mol_type = other DNA; mol_type = other DNA
ctctcacctccgtcaaaa

SEQ ID NO: 10631 - DNA, 18 bp, synthetic construct
  source 1..18: mol_type = other DNA; mol_type = other DNA
gctctcacctccgtcaag

SEQ ID NO: 10632 - DNA, 18 bp, synthetic construct
  source 1..18: mol_type = other DNA; mol_type = other DNA
gctctcacctccgtcaaa

SEQ ID NO: 10633 - DNA, 18 bp, synthetic construct
  source 1..18: mol_type = other DNA; mol_type = other DNA
ggctctcacctccgtcaa

SEQ ID NO: 10634 - DNA, 18 bp, synthetic construct
  source 1..18: mol_type = other DNA; mol_type = other DNA
ggctctcacctccatcaa

SEQ ID NO: 10635 - DNA, 18 bp, synthetic construct
  source 1..18: mol_type = other DNA; mol_type = other DNA
aggctctcacctccgtca

SEQ ID NO: 10636 - DNA, 18 bp, synthetic construct
  source 1..18: mol_type = other DNA; mol_type = other DNA
aggctctcacctccatca

SEQ ID NO: 10637 - DNA, 18 bp, synthetic construct
  source 1..18: mol_type = other DNA; mol_type = other DNA
taggctctcacctccgtc

SEQ ID NO: 10638 - DNA, 18 bp, synthetic construct
  source 1..18: mol_type = other DNA; mol_type = other DNA
taggctctcacctccatc

SEQ ID NO: 10639 - DNA, 18 bp, synthetic construct
  source 1..18: mol_type = other DNA; mol_type = other DNA
ataggctctcacctccgt

SEQ ID NO: 10640 - DNA, 18 bp, synthetic construct
  source 1..18: mol_type = other DNA; mol_type = other DNA
ataggctctcacctccat

SEQ ID NO: 10641 - DNA, 18 bp, synthetic construct
  source 1..18: mol_type = other DNA; mol_type = other DNA
gataggctctcacctccg

SEQ ID NO: 10642 - DNA, 18 bp, synthetic construct
  source 1..18: mol_type = other DNA; mol_type = other DNA
gataggctctcacctcca

SEQ ID NO: 10643 - DNA, 18 bp, synthetic construct
  source 1..18: mol_type = other DNA; mol_type = other DNA
tgataggctctcacctcc

SEQ ID NO: 10644 - DNA, 18 bp, synthetic construct
  source 1..18: mol_type = other DNA; mol_type = other DNA
tgatagactctcacctcc

SEQ ID NO: 10645 - DNA, 18 bp, synthetic construct
  source 1..18: mol_type = other DNA; mol_type = other DNA
atgataggctctcacctc

SEQ ID NO: 10646 - DNA, 18 bp, synthetic construct
  source 1..18: mol_type = other DNA; mol_type = other DNA
atgatagactctcacctc

SEQ ID NO: 10647 - DNA, 18 bp, synthetic construct
  source 1..18: mol_type = other DNA; mol_type = other DNA
catgataggctctcacct

SEQ ID NO: 10648 - DNA, 18 bp, synthetic construct
  source 1..18: mol_type = other DNA; mol_type = other DNA
catgatagactctcacct

SEQ ID NO: 10649 - DNA, 18 bp, synthetic construct
  source 1..18: mol_type = other DNA; mol_type = other DNA
acatgataggctctcacc

SEQ ID NO: 10650 - DNA, 18 bp, synthetic construct
  source 1..18: mol_type = other DNA; mol_type = other DNA
acatgatagactctcacc

SEQ ID NO: 10651 - DNA, 18 bp, synthetic construct
  source 1..18: mol_type = other DNA; mol_type = other DNA
cacatgataggctctcac

SEQ ID NO: 10652 - DNA, 18 bp, synthetic construct
  source 1..18: mol_type = other DNA; mol_type = other DNA
cacatgatagactctcac

SEQ ID NO: 10653 - DNA, 18 bp, synthetic construct
  source 1..18: mol_type = other DNA; mol_type = other DNA
ccacatgataggctctca

SEQ ID NO: 10654 - DNA, 18 bp, synthetic construct
  source 1..18: mol_type = other DNA; mol_type = other DNA
ccacatgatagactctca

SEQ ID NO: 10655 - DNA, 18 bp, synthetic construct
  source 1..18: mol_type = other DNA; mol_type = other DNA
tccacatgataggctctc

SEQ ID NO: 10656 - DNA, 18 bp, synthetic construct
  source 1..18: mol_type = other DNA; mol_type = other DNA
tccacatgatagactctc

SEQ ID NO: 10657 - DNA, 18 bp, synthetic construct
  source 1..18: mol_type = other DNA; mol_type = other DNA
gtccacatgataggctct

SEQ ID NO: 10658 - DNA, 18 bp, synthetic construct
  source 1..18: mol_type = other DNA; mol_type = other DNA
gtccacatgatagactct

SEQ ID NO: 10659 - DNA, 18 bp, synthetic construct
  source 1..18: mol_type = other DNA; mol_type = other DNA
ggtccacatgataggctc

SEQ ID NO: 10660 - DNA, 18 bp, synthetic construct
  source 1..18: mol_type = other DNA; mol_type = other DNA
ggtccacatgatagactc

SEQ ID NO: 10661 - DNA, 18 bp, synthetic construct
  source 1..18: mol_type = other DNA; mol_type = other DNA
gggtccacatgataggct

SEQ ID NO: 10662 - DNA, 18 bp, synthetic construct
  source 1..18: mol_type = other DNA; mol_type = other DNA
gggtccacatgatagact

SEQ ID NO: 10663 - DNA, 18 bp, synthetic construct
  source 1..18: mol_type = other DNA; mol_type = other DNA
cccacgctctcactccaa

SEQ ID NO: 10664 - DNA, 18 bp, synthetic construct
  source 1..18: mol_type = other DNA; mol_type = other DNA
cccacactctcactccaa

SEQ ID NO: 10665 - DNA, 18 bp, synthetic construct
  source 1..18: mol_type = other DNA; mol_type = other DNA
ccccacgctctcactcca

SEQ ID NO: 10666 - DNA, 18 bp, synthetic construct
  source 1..18: mol_type = other DNA; mol_type = other DNA
ccccacactctcactcca

SEQ ID NO: 10667 - DNA, 18 bp, synthetic construct
  source 1..18: mol_type = other DNA; mol_type = other DNA
accccacgctctcactcc

SEQ ID NO: 10668 - DNA, 18 bp, synthetic construct
  source 1..18: mol_type = other DNA; mol_type = other DNA
accccacactctcactcc

SEQ ID NO: 10669 - DNA, 18 bp, synthetic construct
  source 1..18: mol_type = other DNA; mol_type = other DNA
caccccacgctctcactc

SEQ ID NO: 10670 - DNA, 18 bp, synthetic construct
  source 1..18: mol_type = other DNA; mol_type = other DNA
caccccacactctcactc

SEQ ID NO: 10671 - DNA, 18 bp, synthetic construct
  source 1..18: mol_type = other DNA; mol_type = other DNA
acaccccacgctctcact

SEQ ID NO: 10672 - DNA, 18 bp, synthetic construct
  source 1..18: mol_type = other DNA; mol_type = other DNA
acaccccacactctcact

SEQ ID NO: 10673 - DNA, 18 bp, synthetic construct
  source 1..18: mol_type = other DNA; mol_type = other DNA
gacaccccacgctctcac

SEQ ID NO: 10674 - DNA, 18 bp, synthetic construct
  source 1..18: mol_type = other DNA; mol_type = other DNA
gacaccccacactctcac

SEQ ID NO: 10675 - DNA, 18 bp, synthetic construct
  source 1..18: mol_type = other DNA; mol_type = other DNA
agacaccccacgctctca

SEQ ID NO: 10676 - DNA, 18 bp, synthetic construct
  source 1..18: mol_type = other DNA; mol_type = other DNA
agacaccccacactctca

SEQ ID NO: 10677 - DNA, 18 bp, synthetic construct
  source 1..18: mol_type = other DNA; mol_type = other DNA
gagacaccccacgctctc

SEQ ID NO: 10678 - DNA, 18 bp, synthetic construct
  source 1..18: mol_type = other DNA; mol_type = other DNA
gagacaccccacactctc

SEQ ID NO: 10679 - DNA, 18 bp, synthetic construct
  source 1..18: mol_type = other DNA; mol_type = other DNA
tgagacaccccacgctct

SEQ ID NO: 10680 - DNA, 18 bp, synthetic construct
  source 1..18: mol_type = other DNA; mol_type = other DNA
tgagacaccccacactct

SEQ ID NO: 10681 - DNA, 18 bp, synthetic construct
  source 1..18: mol_type = other DNA; mol_type = other DNA
gtgagacaccccacgctc

SEQ ID NO: 10682 - DNA, 18 bp, synthetic construct
  source 1..18: mol_type = other DNA; mol_type = other DNA
gtgagacaccccacactc

SEQ ID NO: 10683 - DNA, 18 bp, synthetic construct
  source 1..18: mol_type = other DNA; mol_type = other DNA
ggtgagacaccccacgct

SEQ ID NO: 10684 - DNA, 18 bp, synthetic construct
  source 1..18: mol_type = other DNA; mol_type = other DNA
ggtgagacaccccacact

SEQ ID NO: 10685 - DNA, 18 bp, synthetic construct
  source 1..18: mol_type = other DNA; mol_type = other DNA
aggtgagacaccccacgc

SEQ ID NO: 10686 - DNA, 18 bp, synthetic construct
  source 1..18: mol_type = other DNA; mol_type = other DNA
aggtgagacaccccacac

SEQ ID NO: 10687 - DNA, 18 bp, synthetic construct
  source 1..18: mol_type = other DNA; mol_type = other DNA
gaggtgagacaccccacg

SEQ ID NO: 10688 - DNA, 18 bp, synthetic construct
  source 1..18: mol_type = other DNA; mol_type = other DNA
gaggtgagacaccccaca

SEQ ID NO: 10689 - DNA, 18 bp, synthetic construct
  source 1..18: mol_type = other DNA; mol_type = other DNA
agaggtgagacaccccac

SEQ ID NO: 10690 - DNA, 18 bp, synthetic construct
  source 1..18: mol_type = other DNA; mol_type = other DNA
agaggtgaaacaccccac

SEQ ID NO: 10691 - DNA, 18 bp, synthetic construct
  source 1..18: mol_type = other DNA; mol_type = other DNA
cagaggtgagacacccca

SEQ ID NO: 10692 - DNA, 18 bp, synthetic construct
  source 1..18: mol_type = other DNA; mol_type = other DNA
cagaggtgaaacacccca

SEQ ID NO: 10693 - DNA, 18 bp, synthetic construct
  source 1..18: mol_type = other DNA; mol_type = other DNA
ccagaggtgagacacccc

SEQ ID NO: 10694 - DNA, 18 bp, synthetic construct
  source 1..18: mol_type = other DNA; mol_type = other DNA
ccagaggtgaaacacccc

SEQ ID NO: 10695 - DNA, 18 bp, synthetic construct
  source 1..18: mol_type = other DNA; mol_type = other DNA
gccagaggtgagacaccc

SEQ ID NO: 10696 - DNA, 18 bp, synthetic construct
  source 1..18: mol_type = other DNA; mol_type = other DNA
gccagaggtgaaacaccc

SEQ ID NO: 10697 - DNA, 18 bp, synthetic construct
  source 1..18: mol_type = other DNA; mol_type = other DNA
agccagaggtgagacacc

SEQ ID NO: 10698 - DNA, 18 bp, synthetic construct
  source 1..18: mol_type = other DNA; mol_type = other DNA
agccagaggtgaaacacc

SEQ ID NO: 10699 - DNA, 18 bp, synthetic construct
  source 1..18: mol_type = other DNA; mol_type = other DNA
aagccagaggtgagacac

SEQ ID NO: 10700 - DNA, 18 bp, synthetic construct
  source 1..18: mol_type = other DNA; mol_type = other DNA
aagccagaggtgaaacac

SEQ ID NO: 10701 - DNA, 18 bp, synthetic construct
  source 1..18: mol_type = other DNA; mol_type = other DNA
taagccagaggtgagaca

SEQ ID NO: 10702 - DNA, 18 bp, synthetic construct
  source 1..18: mol_type = other DNA; mol_type = other DNA
taagccagaggtgaaaca

SEQ ID NO: 10703 - DNA, 18 bp, synthetic construct
  source 1..18: mol_type = other DNA; mol_type = other DNA
ctaagccagaggtgagac

SEQ ID NO: 10704 - DNA, 18 bp, synthetic construct
  source 1..18: mol_type = other DNA; mol_type = other DNA
ctaagccagaggtgaaac

SEQ ID NO: 10705 - DNA, 18 bp, synthetic construct
  source 1..18: mol_type = other DNA; mol_type = other DNA
cctaagccagaggtgaga

SEQ ID NO: 10706 - DNA, 18 bp, synthetic construct
  source 1..18: mol_type = other DNA; mol_type = other DNA
cctaagccagaggtgaaa

SEQ ID NO: 10707 - DNA, 18 bp, synthetic construct
  source 1..18: mol_type = other DNA; mol_type = other DNA
tcctaagccagaggtgag

SEQ ID NO: 10708 - DNA, 18 bp, synthetic construct
  source 1..18: mol_type = other DNA; mol_type = other DNA
tcctaagccagaggtgaa

SEQ ID NO: 10709 - DNA, 18 bp, synthetic construct
  source 1..18: mol_type = other DNA; mol_type = other DNA
ctcctaagccagaggtga

SEQ ID NO: 10710 - DNA, 18 bp, synthetic construct
  source 1..18: mol_type = other DNA; mol_type = other DNA
ctcctaagccagaggtaa

SEQ ID NO: 10711 - DNA, 18 bp, synthetic construct
  source 1..18: mol_type = other DNA; mol_type = other DNA
cctcctaagccagaggtg

SEQ ID NO: 10712 - DNA, 18 bp, synthetic construct
  source 1..18: mol_type = other DNA; mol_type = other DNA
cctcctaagccagaggta

SEQ ID NO: 10713 - DNA, 18 bp, synthetic construct
  source 1..18: mol_type = other DNA; mol_type = other DNA
tcctcctaagccagaggt

SEQ ID NO: 10714 - DNA, 18 bp, synthetic construct
  source 1..18: mol_type = other DNA; mol_type = other DNA
tcctcctaagccagagat

SEQ ID NO: 10715 - DNA, 18 bp, synthetic construct
  source 1..18: mol_type = other DNA; mol_type = other DNA
ctcctcctaagccagagg

SEQ ID NO: 10716 - DNA, 18 bp, synthetic construct
  source 1..18: mol_type = other DNA; mol_type = other DNA
ctcctcctaagccagaga

SEQ ID NO: 10717 - DNA, 18 bp, synthetic construct
  source 1..18: mol_type = other DNA; mol_type = other DNA
cctcctcctaagccagag

SEQ ID NO: 10718 - DNA, 18 bp, synthetic construct
  source 1..18: mol_type = other DNA; mol_type = other DNA
cctcctcctaagccagaa

SEQ ID NO: 10719 - DNA, 18 bp, synthetic construct
  source 1..18: mol_type = other DNA; mol_type = other DNA
tcctcctcctaagccaga

SEQ ID NO: 10720 - DNA, 18 bp, synthetic construct
  source 1..18: mol_type = other DNA; mol_type = other DNA
tcctcctcctaagccaaa

SEQ ID NO: 10721 - DNA, 18 bp, synthetic construct
  source 1..18: mol_type = other DNA; mol_type = other DNA
gtcctcctcctaagccag

SEQ ID NO: 10722 - DNA, 18 bp, synthetic construct
  source 1..18: mol_type = other DNA; mol_type = other DNA
gtcctcctcctaagccaa

SEQ ID NO: 10723 - DNA, 18 bp, synthetic construct
  source 1..18: mol_type = other DNA; mol_type = other DNA
agtcctcctcctaagcca

SEQ ID NO: 10724 - DNA, 18 bp, synthetic construct
  source 1..18: mol_type = other DNA; mol_type = other DNA
agtcctcctcctaaacca

SEQ ID NO: 10725 - DNA, 18 bp, synthetic construct
  source 1..18: mol_type = other DNA; mol_type = other DNA
cagtcctcctcctaagcc

SEQ ID NO: 10726 - DNA, 18 bp, synthetic construct
  source 1..18: mol_type = other DNA; mol_type = other DNA
cagtcctcctcctaaacc

SEQ ID NO: 10727 - DNA, 18 bp, synthetic construct
  source 1..18: mol_type = other DNA; mol_type = other DNA
ccagtcctcctcctaagc

SEQ ID NO: 10728 - DNA, 18 bp, synthetic construct
  source 1..18: mol_type = other DNA; mol_type = other DNA
ccagtcctcctcctaaac

SEQ ID NO: 10729 - DNA, 18 bp, synthetic construct
  source 1..18: mol_type = other DNA; mol_type = other DNA
cccagtcctcctcctaag

SEQ ID NO: 10730 - DNA, 18 bp, synthetic construct
  source 1..18: mol_type = other DNA; mol_type = other DNA
cccagtcctcctcctaaa

SEQ ID NO: 10731 - DNA, 18 bp, synthetic construct
  source 1..18: mol_type = other DNA; mol_type = other DNA
ccccagtcctcctcctaa

SEQ ID NO: 10732 - DNA, 18 bp, synthetic construct
  source 1..18: mol_type = other DNA; mol_type = other DNA
ccccaatcctcctcctaa

SEQ ID NO: 10733 - DNA, 18 bp, synthetic construct
  source 1..18: mol_type = other DNA; mol_type = other DNA
cccccagtcctcctccta

SEQ ID NO: 10734 - DNA, 18 bp, synthetic construct
  source 1..18: mol_type = other DNA; mol_type = other DNA
cccccaatcctcctccta

SEQ ID NO: 10735 - DNA, 18 bp, synthetic construct
  source 1..18: mol_type = other DNA; mol_type = other DNA
gcccccagtcctcctcct

SEQ ID NO: 10736 - DNA, 18 bp, synthetic construct
  source 1..18: mol_type = other DNA; mol_type = other DNA
gcccccaatcctcctcct

SEQ ID NO: 10737 - DNA, 18 bp, synthetic construct
  source 1..18: mol_type = other DNA; mol_type = other DNA
ggcccccagtcctcctcc

SEQ ID NO: 10738 - DNA, 18 bp, synthetic construct
  source 1..18: mol_type = other DNA; mol_type = other DNA
ggcccccaatcctcctcc

SEQ ID NO: 10739 - DNA, 18 bp, synthetic construct
  source 1..18: mol_type = other DNA; mol_type = other DNA
gggcccccagtcctcctc

SEQ ID NO: 10740 - DNA, 18 bp, synthetic construct
  source 1..18: mol_type = other DNA; mol_type = other DNA
gggcccccaatcctcctc

SEQ ID NO: 10741 - DNA, 18 bp, synthetic construct
  source 1..18: mol_type = other DNA; mol_type = other DNA
gaggcccccagtcctcct

SEQ ID NO: 10742 - DNA, 18 bp, synthetic construct
  source 1..18: mol_type = other DNA; mol_type = other DNA
ggagcccccagtcctcct

SEQ ID NO: 10743 - DNA, 18 bp, synthetic construct
  source 1..18: mol_type = other DNA; mol_type = other DNA
gggacccccagtcctcct

SEQ ID NO: 10744 - DNA, 18 bp, synthetic construct
  source 1..18: mol_type = other DNA; mol_type = other DNA
gagggcccccagtcctcc

SEQ ID NO: 10745 - DNA, 18 bp, synthetic construct
  source 1..18: mol_type = other DNA; mol_type = other DNA
ggaggcccccagtcctcc

SEQ ID NO: 10746 - DNA, 18 bp, synthetic construct
  source 1..18: mol_type = other DNA; mol_type = other DNA
gggagcccccagtcctcc

SEQ ID NO: 10747 - DNA, 18 bp, synthetic construct
  source 1..18: mol_type = other DNA; mol_type = other DNA
tgagggcccccagtcctc

SEQ ID NO: 10748 - DNA, 18 bp, synthetic construct
  source 1..18: mol_type = other DNA; mol_type = other DNA
tggaggcccccagtcctc

SEQ ID NO: 10749 - DNA, 18 bp, synthetic construct
  source 1..18: mol_type = other DNA; mol_type = other DNA
tgggagcccccagtcctc

SEQ ID NO: 10750 - DNA, 18 bp, synthetic construct
  source 1..18: mol_type = other DNA; mol_type = other DNA
ctgagggcccccagtcct

SEQ ID NO: 10751 - DNA, 18 bp, synthetic construct
  source 1..18: mol_type = other DNA; mol_type = other DNA
ctggaggcccccagtcct

SEQ ID NO: 10752 - DNA, 18 bp, synthetic construct
  source 1..18: mol_type = other DNA; mol_type = other DNA
ctgggagcccccagtcct

SEQ ID NO: 10753 - DNA, 18 bp, synthetic construct
  source 1..18: mol_type = other DNA; mol_type = other DNA
actgagggcccccagtcc

SEQ ID NO: 10754 - DNA, 18 bp, synthetic construct
  source 1..18: mol_type = other DNA; mol_type = other DNA
actggaggcccccagtcc

SEQ ID NO: 10755 - DNA, 18 bp, synthetic construct
  source 1..18: mol_type = other DNA; mol_type = other DNA
actgggagcccccagtcc

SEQ ID NO: 10756 - DNA, 18 bp, synthetic construct
  source 1..18: mol_type = other DNA; mol_type = other DNA
cactgagggcccccagtc

SEQ ID NO: 10757 - DNA, 18 bp, synthetic construct
  source 1..18: mol_type = other DNA; mol_type = other DNA
cactggaggcccccagtc

SEQ ID NO: 10758 - DNA, 18 bp, synthetic construct
  source 1..18: mol_type = other DNA; mol_type = other DNA
cactgggagcccccagtc

SEQ ID NO: 10759 - DNA, 18 bp, synthetic construct
  source 1..18: mol_type = other DNA; mol_type = other DNA
gcactgagggcccccagt

SEQ ID NO: 10760 - DNA, 18 bp, synthetic construct
  source 1..18: mol_type = other DNA; mol_type = other DNA
gcactggaggcccccagt

SEQ ID NO: 10761 - DNA, 18 bp, synthetic construct
  source 1..18: mol_type = other DNA; mol_type = other DNA
gcactgggagcccccagt

SEQ ID NO: 10762 - DNA, 18 bp, synthetic construct
  source 1..18: mol_type = other DNA; mol_type = other DNA
ggcactgtgggcccccag

SEQ ID NO: 10763 - DNA, 18 bp, synthetic construct
  source 1..18: mol_type = other DNA; mol_type = other DNA
ggcactggtggcccccag

SEQ ID NO: 10764 - DNA, 18 bp, synthetic construct
  source 1..18: mol_type = other DNA; mol_type = other DNA
ggcactgggtgcccccag

SEQ ID NO: 10765 - DNA, 18 bp, synthetic construct
  source 1..18: mol_type = other DNA; mol_type = other DNA
gggcactgtgggccccca

SEQ ID NO: 10766 - DNA, 18 bp, synthetic construct
  source 1..18: mol_type = other DNA; mol_type = other DNA
gggcactggtggccccca

SEQ ID NO: 10767 - DNA, 18 bp, synthetic construct
  source 1..18: mol_type = other DNA; mol_type = other DNA
gggcactgggtgccccca

SEQ ID NO: 10768 - DNA, 18 bp, synthetic construct
  source 1..18: mol_type = other DNA; mol_type = other DNA
agggcactgtgggccccc

SEQ ID NO: 10769 - DNA, 18 bp, synthetic construct
  source 1..18: mol_type = other DNA; mol_type = other DNA
agggcactggtggccccc

SEQ ID NO: 10770 - DNA, 18 bp, synthetic construct
  source 1..18: mol_type = other DNA; mol_type = other DNA
agggcactgggtgccccc

SEQ ID NO: 10771 - DNA, 18 bp, synthetic construct
  source 1..18: mol_type = other DNA; mol_type = other DNA
cagggcactgtgggcccc

SEQ ID NO: 10772 - DNA, 18 bp, synthetic construct
  source 1..18: mol_type = other DNA; mol_type = other DNA
cagggcactggtggcccc

SEQ ID NO: 10773 - DNA, 18 bp, synthetic construct
  source 1..18: mol_type = other DNA; mol_type = other DNA
cagggcactgggtgcccc

SEQ ID NO: 10774 - DNA, 18 bp, synthetic construct
  source 1..18: mol_type = other DNA; mol_type = other DNA
ccagggcactgtgggccc

SEQ ID NO: 10775 - DNA, 18 bp, synthetic construct
  source 1..18: mol_type = other DNA; mol_type = other DNA
ccagggcactggtggccc

SEQ ID NO: 10776 - DNA, 18 bp, synthetic construct
  source 1..18: mol_type = other DNA; mol_type = other DNA
ccagggcactgggtgccc

SEQ ID NO: 10777 - DNA, 18 bp, synthetic construct
  source 1..18: mol_type = other DNA; mol_type = other DNA
tccagggcactgagggcc

SEQ ID NO: 10778 - DNA, 18 bp, synthetic construct
  source 1..18: mol_type = other DNA; mol_type = other DNA
tccagggcactggaggcc

SEQ ID NO: 10779 - DNA, 18 bp, synthetic construct
  source 1..18: mol_type = other DNA; mol_type = other DNA
tccagggcactgggagcc

SEQ ID NO: 10780 - DNA, 18 bp, synthetic construct
  source 1..18: mol_type = other DNA; mol_type = other DNA
ttccagggcactgagggc

SEQ ID NO: 10781 - DNA, 18 bp, synthetic construct
  source 1..18: mol_type = other DNA; mol_type = other DNA
ttccagggcactggaggc

SEQ ID NO: 10782 - DNA, 18 bp, synthetic construct
  source 1..18: mol_type = other DNA; mol_type = other DNA
ttccagggcactgggagc

SEQ ID NO: 10783 - DNA, 18 bp, synthetic construct
  source 1..18: mol_type = other DNA; mol_type = other DNA
gttccagggcactgaggg

SEQ ID NO: 10784 - DNA, 18 bp, synthetic construct
  source 1..18: mol_type = other DNA; mol_type = other DNA
gttccagggcactggagg

SEQ ID NO: 10785 - DNA, 18 bp, synthetic construct
  source 1..18: mol_type = other DNA; mol_type = other DNA
gttccagggcactgggag

SEQ ID NO: 10786 - DNA, 18 bp, synthetic construct
  source 1..18: mol_type = other DNA; mol_type = other DNA
ggttccagggcactaggg

SEQ ID NO: 10787 - DNA, 18 bp, synthetic construct
  source 1..18: mol_type = other DNA; mol_type = other DNA
ggttccagggcactgagg

SEQ ID NO: 10788 - DNA, 18 bp, synthetic construct
  source 1..18: mol_type = other DNA; mol_type = other DNA
ggttccagggcactggag

SEQ ID NO: 10789 - DNA, 18 bp, synthetic construct
  source 1..18: mol_type = other DNA; mol_type = other DNA
aggttccagggcactggg

SEQ ID NO: 10790 - DNA, 18 bp, synthetic construct
  source 1..18: mol_type = other DNA; mol_type = other DNA
aggttccagggcactgga

SEQ ID NO: 10791 - DNA, 18 bp, synthetic construct
  source 1..18: mol_type = other DNA; mol_type = other DNA
gaggttccagggcactgg

SEQ ID NO: 10792 - DNA, 18 bp, synthetic construct
  source 1..18: mol_type = other DNA; mol_type = other DNA
gaggttccagggcactga

SEQ ID NO: 10793 - DNA, 18 bp, synthetic construct
  source 1..18: mol_type = other DNA; mol_type = other DNA
ggaggttccagggcactg

SEQ ID NO: 10794 - DNA, 18 bp, synthetic construct
  source 1..18: mol_type = other DNA; mol_type = other DNA
ggaggttccagggcacta

SEQ ID NO: 10795 - DNA, 18 bp, synthetic construct
  source 1..18: mol_type = other DNA; mol_type = other DNA
tggaggttccagggcact

SEQ ID NO: 10796 - DNA, 18 bp, synthetic construct
  source 1..18: mol_type = other DNA; mol_type = other DNA
tggaggttccaggacact

SEQ ID NO: 10797 - DNA, 18 bp, synthetic construct
  source 1..18: mol_type = other DNA; mol_type = other DNA
atggaggttccagggcac

SEQ ID NO: 10798 - DNA, 18 bp, synthetic construct
  source 1..18: mol_type = other DNA; mol_type = other DNA
atggaggttccaggacac

SEQ ID NO: 10799 - DNA, 18 bp, synthetic construct
  source 1..18: mol_type = other DNA; mol_type = other DNA
tatggaggttccagggca

SEQ ID NO: 10800 - DNA, 18 bp, synthetic construct
  source 1..18: mol_type = other DNA; mol_type = other DNA
tatggaggttccaggaca

SEQ ID NO: 10801 - DNA, 18 bp, synthetic construct
  source 1..18: mol_type = other DNA; mol_type = other DNA
atatggaggttccagggc

SEQ ID NO: 10802 - DNA, 18 bp, synthetic construct
  source 1..18: mol_type = other DNA; mol_type = other DNA
atatggaggttccaggac

SEQ ID NO: 10803 - DNA, 18 bp, synthetic construct
  source 1..18: mol_type = other DNA; mol_type = other DNA
aatatggaggttccaggg

SEQ ID NO: 10804 - DNA, 18 bp, synthetic construct
  source 1..18: mol_type = other DNA; mol_type = other DNA
aatatggaggttccagga

SEQ ID NO: 10805 - DNA, 18 bp, synthetic construct
  source 1..18: mol_type = other DNA; mol_type = other DNA
gaatatggaggttccagg

SEQ ID NO: 10806 - DNA, 18 bp, synthetic construct
  source 1..18: mol_type = other DNA; mol_type = other DNA
gaatatggaggttccaga

SEQ ID NO: 10807 - DNA, 18 bp, synthetic construct
  source 1..18: mol_type = other DNA; mol_type = other DNA
ggaatatggaggttccag

SEQ ID NO: 10808 - DNA, 18 bp, synthetic construct
  source 1..18: mol_type = other DNA; mol_type = other DNA
ggaatatggaggttccaa

SEQ ID NO: 10809 - DNA, 18 bp, synthetic construct
  source 1..18: mol_type = other DNA; mol_type = other DNA
gggaatatggaggttcca

SEQ ID NO: 10810 - DNA, 18 bp, synthetic construct
  source 1..18: mol_type = other DNA; mol_type = other DNA
gggaatatggagattcca

SEQ ID NO: 10811 - DNA, 18 bp, synthetic construct
  source 1..18: mol_type = other DNA; mol_type = other DNA
agggaatatggaggttcc

SEQ ID NO: 10812 - DNA, 18 bp, synthetic construct
  source 1..18: mol_type = other DNA; mol_type = other DNA
gaggaatatggaggttcc

SEQ ID NO: 10813 - DNA, 18 bp, synthetic construct
  source 1..18: mol_type = other DNA; mol_type = other DNA
ggagaatatggaggttcc

SEQ ID NO: 10814 - DNA, 18 bp, synthetic construct
  source 1..18: mol_type = other DNA; mol_type = other DNA
gggaaatatggaggttcc

SEQ ID NO: 10815 - DNA, 18 bp, synthetic construct
  source 1..18: mol_type = other DNA; mol_type = other DNA
atgggaatatggaggttc

SEQ ID NO: 10816 - DNA, 18 bp, synthetic construct
  source 1..18: mol_type = other DNA; mol_type = other DNA
agtggaatatggaggttc

SEQ ID NO: 10817 - DNA, 18 bp, synthetic construct
  source 1..18: mol_type = other DNA; mol_type = other DNA
aggtgaatatggaggttc

SEQ ID NO: 10818 - DNA, 18 bp, synthetic construct
  source 1..18: mol_type = other DNA; mol_type = other DNA
agggtaatatggaggttc

SEQ ID NO: 10819 - DNA, 18 bp, synthetic construct
  source 1..18: mol_type = other DNA; mol_type = other DNA
gatgggaatatggaggtt

SEQ ID NO: 10820 - DNA, 18 bp, synthetic construct
  source 1..18: mol_type = other DNA; mol_type = other DNA
gagtggaatatggaggtt

SEQ ID NO: 10821 - DNA, 18 bp, synthetic construct
  source 1..18: mol_type = other DNA; mol_type = other DNA
gaggtgaatatggaggtt

SEQ ID NO: 10822 - DNA, 18 bp, synthetic construct
  source 1..18: mol_type = other DNA; mol_type = other DNA
gagggtaatatggaggtt

SEQ ID NO: 10823 - DNA, 18 bp, synthetic construct
  source 1..18: mol_type = other DNA; mol_type = other DNA
ggatgggaatatggaggt

SEQ ID NO: 10824 - DNA, 18 bp, synthetic construct
  source 1..18: mol_type = other DNA; mol_type = other DNA
ggagtggaatatggaggt

SEQ ID NO: 10825 - DNA, 18 bp, synthetic construct
  source 1..18: mol_type = other DNA; mol_type = other DNA
ggaggtgaatatggaggt

SEQ ID NO: 10826 - DNA, 18 bp, synthetic construct
  source 1..18: mol_type = other DNA; mol_type = other DNA
ggagggtaatatggaggt

SEQ ID NO: 10827 - DNA, 18 bp, synthetic construct
  source 1..18: mol_type = other DNA; mol_type = other DNA
gggatgggaatatggagg

SEQ ID NO: 10828 - DNA, 18 bp, synthetic construct
  source 1..18: mol_type = other DNA; mol_type = other DNA
gggagtggaatatggagg

SEQ ID NO: 10829 - DNA, 18 bp, synthetic construct
  source 1..18: mol_type = other DNA; mol_type = other DNA
gggaggtgaatatggagg

SEQ ID NO: 10830 - DNA, 18 bp, synthetic construct
  source 1..18: mol_type = other DNA; mol_type = other DNA
gggagggtaatatggagg

SEQ ID NO: 10831 - DNA, 18 bp, synthetic construct
  source 1..18: mol_type = other DNA; mol_type = other DNA
agggatgggaatatggag

SEQ ID NO: 10832 - DNA, 18 bp, synthetic construct
  source 1..18: mol_type = other DNA; mol_type = other DNA
agggagtggaatatggag

SEQ ID NO: 10833 - DNA, 18 bp, synthetic construct
  source 1..18: mol_type = other DNA; mol_type = other DNA
agggaggtgaatatggag

SEQ ID NO: 10834 - DNA, 18 bp, synthetic construct
  source 1..18: mol_type = other DNA; mol_type = other DNA
agggagggtaatatggag

SEQ ID NO: 10835 - DNA, 18 bp, synthetic construct
  source 1..18: mol_type = other DNA; mol_type = other DNA
cagggatgggaatatgga

SEQ ID NO: 10836 - DNA, 18 bp, synthetic construct
  source 1..18: mol_type = other DNA; mol_type = other DNA
cagggagtggaatatgga

SEQ ID NO: 10837 - DNA, 18 bp, synthetic construct
  source 1..18: mol_type = other DNA; mol_type = other DNA
cagggaggtgaatatgga

SEQ ID NO: 10838 - DNA, 18 bp, synthetic construct
  source 1..18: mol_type = other DNA; mol_type = other DNA
cagggagggtaatatgga

SEQ ID NO: 10839 - DNA, 18 bp, synthetic construct
  source 1..18: mol_type = other DNA; mol_type = other DNA
tcagggatgggaatatgg

SEQ ID NO: 10840 - DNA, 18 bp, synthetic construct
  source 1..18: mol_type = other DNA; mol_type = other DNA
tcagggagtggaatatgg

SEQ ID NO: 10841 - DNA, 18 bp, synthetic construct
  source 1..18: mol_type = other DNA; mol_type = other DNA
tcagggaggtgaatatgg

SEQ ID NO: 10842 - DNA, 18 bp, synthetic construct
  source 1..18: mol_type = other DNA; mol_type = other DNA
tcagggagggtaatatgg

SEQ ID NO: 10843 - DNA, 18 bp, synthetic construct
  source 1..18: mol_type = other DNA; mol_type = other DNA
gtcagggatgggaatatg

SEQ ID NO: 10844 - DNA, 18 bp, synthetic construct
  source 1..18: mol_type = other DNA; mol_type = other DNA
gtcagggagtggaatatg

SEQ ID NO: 10845 - DNA, 18 bp, synthetic construct
  source 1..18: mol_type = other DNA; mol_type = other DNA
gtcagggaggtgaatatg

SEQ ID NO: 10846 - DNA, 18 bp, synthetic construct
  source 1..18: mol_type = other DNA; mol_type = other DNA
gtcagggagggtaatatg

SEQ ID NO: 10847 - DNA, 18 bp, synthetic construct
  source 1..18: mol_type = other DNA; mol_type = other DNA
ggtcagggatgggaatat

SEQ ID NO: 10848 - DNA, 18 bp, synthetic construct
  source 1..18: mol_type = other DNA; mol_type = other DNA
ggtcagggagtggaatat

SEQ ID NO: 10849 - DNA, 18 bp, synthetic construct
  source 1..18: mol_type = other DNA; mol_type = other DNA
ggtcagggaggtgaatat

SEQ ID NO: 10850 - DNA, 18 bp, synthetic construct
  source 1..18: mol_type = other DNA; mol_type = other DNA
ggtcagggagggtaatat

SEQ ID NO: 10851 - DNA, 18 bp, synthetic construct
  source 1..18: mol_type = other DNA; mol_type = other DNA
gggtcagggatgggaata

SEQ ID NO: 10852 - DNA, 18 bp, synthetic construct
  source 1..18: mol_type = other DNA; mol_type = other DNA
gggtcagggagtggaata

SEQ ID NO: 10853 - DNA, 18 bp, synthetic construct
  source 1..18: mol_type = other DNA; mol_type = other DNA
gggtcagggaggtgaata

SEQ ID NO: 10854 - DNA, 18 bp, synthetic construct
  source 1..18: mol_type = other DNA; mol_type = other DNA
gggtcagggagggtaata

SEQ ID NO: 10855 - DNA, 18 bp, synthetic construct
  source 1..18: mol_type = other DNA; mol_type = other DNA
tgtgagggtcagggaggg

SEQ ID NO: 10856 - DNA, 18 bp, synthetic construct
  source 1..18: mol_type = other DNA; mol_type = other DNA
tgtggaggtcagggaggg

SEQ ID NO: 10857 - DNA, 18 bp, synthetic construct
  source 1..18: mol_type = other DNA; mol_type = other DNA
tgtgggagtcagggaggg

SEQ ID NO: 10858 - DNA, 18 bp, synthetic construct
  source 1..18: mol_type = other DNA; mol_type = other DNA
ctgtgagggtcagggagg

SEQ ID NO: 10859 - DNA, 18 bp, synthetic construct
  source 1..18: mol_type = other DNA; mol_type = other DNA
ctgtggaggtcagggagg

SEQ ID NO: 10860 - DNA, 18 bp, synthetic construct
  source 1..18: mol_type = other DNA; mol_type = other DNA
ctgtgggagtcagggagg

SEQ ID NO: 10861 - DNA, 18 bp, synthetic construct
  source 1..18: mol_type = other DNA; mol_type = other DNA
tgtccttgttcagctgct

SEQ ID NO: 10862 - DNA, 18 bp, synthetic construct
  source 1..18: mol_type = other DNA; mol_type = other DNA
tgtccttgttcagctact

SEQ ID NO: 10863 - DNA, 18 bp, synthetic construct
  source 1..18: mol_type = other DNA; mol_type = other DNA
gtgtccttgttcagctgc

SEQ ID NO: 10864 - DNA, 18 bp, synthetic construct
  source 1..18: mol_type = other DNA; mol_type = other DNA
gtgtccttgttcagctac

SEQ ID NO: 10865 - DNA, 18 bp, synthetic construct
  source 1..18: mol_type = other DNA; mol_type = other DNA
cgtgtccttgttcagctg

SEQ ID NO: 10866 - DNA, 18 bp, synthetic construct
  source 1..18: mol_type = other DNA; mol_type = other DNA
cgtgtccttgttcagcta

SEQ ID NO: 10867 - DNA, 18 bp, synthetic construct
  source 1..18: mol_type = other DNA; mol_type = other DNA
gcgtgtccttgttcagct

SEQ ID NO: 10868 - DNA, 18 bp, synthetic construct
  source 1..18: mol_type = other DNA; mol_type = other DNA
gcgtgtccttgttcaact

SEQ ID NO: 10869 - DNA, 18 bp, synthetic construct
  source 1..18: mol_type = other DNA; mol_type = other DNA
cgcgtgtccttgttcagc

SEQ ID NO: 10870 - DNA, 18 bp, synthetic construct
  source 1..18: mol_type = other DNA; mol_type = other DNA
cgcgtgtccttgttcaac

SEQ ID NO: 10871 - DNA, 18 bp, synthetic construct
  source 1..18: mol_type = other DNA; mol_type = other DNA
acgcgtgtccttgttcag

SEQ ID NO: 10872 - DNA, 18 bp, synthetic construct
  source 1..18: mol_type = other DNA; mol_type = other DNA
acgcgtgtccttgttcaa

SEQ ID NO: 10873 - DNA, 18 bp, synthetic construct
  source 1..18: mol_type = other DNA; mol_type = other DNA
aacgcgtgtccttgttca

SEQ ID NO: 10874 - DNA, 18 bp, synthetic construct
  source 1..18: mol_type = other DNA; mol_type = other DNA
aacgcgtgtccttattca

SEQ ID NO: 10875 - DNA, 18 bp, synthetic construct
  source 1..18: mol_type = other DNA; mol_type = other DNA
gaacgcgtgtccttgttc

SEQ ID NO: 10876 - DNA, 18 bp, synthetic construct
  source 1..18: mol_type = other DNA; mol_type = other DNA
gaacgcgtgtccttattc

SEQ ID NO: 10877 - DNA, 18 bp, synthetic construct
  source 1..18: mol_type = other DNA; mol_type = other DNA
ggaacgcgtgtccttgtt

SEQ ID NO: 10878 - DNA, 18 bp, synthetic construct
  source 1..18: mol_type = other DNA; mol_type = other DNA
ggaacgcgtgtccttatt

SEQ ID NO: 10879 - DNA, 18 bp, synthetic construct
  source 1..18: mol_type = other DNA; mol_type = other DNA
gggaacgcgtgtccttgt

SEQ ID NO: 10880 - DNA, 18 bp, synthetic construct
  source 1..18: mol_type = other DNA; mol_type = other DNA
gggaacgcgtgtccttat

SEQ ID NO: 10881 - DNA, 18 bp, synthetic construct
  source 1..18: mol_type = other DNA; mol_type = other DNA
agggaacgcgtgtccttg

SEQ ID NO: 10882 - DNA, 18 bp, synthetic construct
  source 1..18: mol_type = other DNA; mol_type = other DNA
agggaacgcgtgtcctta

SEQ ID NO: 10883 - DNA, 18 bp, synthetic construct
  source 1..18: mol_type = other DNA; mol_type = other DNA
cagggaacgcgtgtcctt

SEQ ID NO: 10884 - DNA, 18 bp, synthetic construct
  source 1..18: mol_type = other DNA; mol_type = other DNA
cagggaacgcgtatcctt

SEQ ID NO: 10885 - DNA, 18 bp, synthetic construct
  source 1..18: mol_type = other DNA; mol_type = other DNA
ccagggaacgcgtgtcct

SEQ ID NO: 10886 - DNA, 18 bp, synthetic construct
  source 1..18: mol_type = other DNA; mol_type = other DNA
ccagggaacgcgtatcct

SEQ ID NO: 10887 - DNA, 18 bp, synthetic construct
  source 1..18: mol_type = other DNA; mol_type = other DNA
cccagggaacgcgtgtcc

SEQ ID NO: 10888 - DNA, 18 bp, synthetic construct
  source 1..18: mol_type = other DNA; mol_type = other DNA
cccagggaacgcgtatcc

SEQ ID NO: 10889 - DNA, 18 bp, synthetic construct
  source 1..18: mol_type = other DNA; mol_type = other DNA
ccccagggaacgcgtgtc

SEQ ID NO: 10890 - DNA, 18 bp, synthetic construct
  source 1..18: mol_type = other DNA; mol_type = other DNA
ccccagggaacgcgtatc

SEQ ID NO: 10891 - DNA, 18 bp, synthetic construct
  source 1..18: mol_type = other DNA; mol_type = other DNA
cccccagggaacgcgtgt

SEQ ID NO: 10892 - DNA, 18 bp, synthetic construct
  source 1..18: mol_type = other DNA; mol_type = other DNA
cccccagggaacgcgtat

SEQ ID NO: 10893 - DNA, 18 bp, synthetic construct
  source 1..18: mol_type = other DNA; mol_type = other DNA
tcccccagggaacgcgtg

SEQ ID NO: 10894 - DNA, 18 bp, synthetic construct
  source 1..18: mol_type = other DNA; mol_type = other DNA
tcccccagggaacgcgta

SEQ ID NO: 10895 - DNA, 18 bp, synthetic construct
  source 1..18: mol_type = other DNA; mol_type = other DNA
ctcccccagggaacgcgt

SEQ ID NO: 10896 - DNA, 18 bp, synthetic construct
  source 1..18: mol_type = other DNA; mol_type = other DNA
ctcccccagggaacgcat

SEQ ID NO: 10897 - DNA, 18 bp, synthetic construct
  source 1..18: mol_type = other DNA; mol_type = other DNA
cctcccccagggaacgcg

SEQ ID NO: 10898 - DNA, 18 bp, synthetic construct
  source 1..18: mol_type = other DNA; mol_type = other DNA
cctcccccagggaacgca

SEQ ID NO: 10899 - DNA, 18 bp, synthetic construct
  source 1..18: mol_type = other DNA; mol_type = other DNA
tcctcccccagggaacgc

SEQ ID NO: 10900 - DNA, 18 bp, synthetic construct
  source 1..18: mol_type = other DNA; mol_type = other DNA
tcctcccccagggaacac

SEQ ID NO: 10901 - DNA, 18 bp, synthetic construct
  source 1..18: mol_type = other DNA; mol_type = other DNA
ttcctcccccagggaacg

SEQ ID NO: 10902 - DNA, 18 bp, synthetic construct
  source 1..18: mol_type = other DNA; mol_type = other DNA
ttcctcccccagggaaca

SEQ ID NO: 10903 - DNA, 18 bp, synthetic construct
  source 1..18: mol_type = other DNA; mol_type = other DNA
gttcctcccccagggaac

SEQ ID NO: 10904 - DNA, 18 bp, synthetic construct
  source 1..18: mol_type = other DNA; mol_type = other DNA
gttcctcccccaggaaac

SEQ ID NO: 10905 - DNA, 18 bp, synthetic construct
  source 1..18: mol_type = other DNA; mol_type = other DNA
ggttcctcccccagggaa

SEQ ID NO: 10906 - DNA, 18 bp, synthetic construct
  source 1..18: mol_type = other DNA; mol_type = other DNA
ggttcctcccccaggaaa

SEQ ID NO: 10907 - DNA, 18 bp, synthetic construct
  source 1..18: mol_type = other DNA; mol_type = other DNA
tggttcctcccccaggga

SEQ ID NO: 10908 - DNA, 18 bp, synthetic construct
  source 1..18: mol_type = other DNA; mol_type = other DNA
tggttcctcccccaggaa

SEQ ID NO: 10909 - DNA, 18 bp, synthetic construct
  source 1..18: mol_type = other DNA; mol_type = other DNA
ctggttcctcccccaggg

SEQ ID NO: 10910 - DNA, 18 bp, synthetic construct
  source 1..18: mol_type = other DNA; mol_type = other DNA
ctggttcctcccccagga

SEQ ID NO: 10911 - DNA, 18 bp, synthetic construct
  source 1..18: mol_type = other DNA; mol_type = other DNA
actggttcctcccccagg

SEQ ID NO: 10912 - DNA, 18 bp, synthetic construct
  source 1..18: mol_type = other DNA; mol_type = other DNA
actggttcctcccccaga

SEQ ID NO: 10913 - DNA, 18 bp, synthetic construct
  source 1..18: mol_type = other DNA; mol_type = other DNA
aactggttcctcccccag

SEQ ID NO: 10914 - DNA, 18 bp, synthetic construct
  source 1..18: mol_type = other DNA; mol_type = other DNA
aactggttcctcccccaa

SEQ ID NO: 10915 - DNA, 18 bp, synthetic construct
  source 1..18: mol_type = other DNA; mol_type = other DNA
caactggttcctccccca

SEQ ID NO: 10916 - DNA, 18 bp, synthetic construct
  source 1..18: mol_type = other DNA; mol_type = other DNA
caactgattcctccccca

SEQ ID NO: 10917 - DNA, 18 bp, synthetic construct
  source 1..18: mol_type = other DNA; mol_type = other DNA
ccaactggttcctccccc

SEQ ID NO: 10918 - DNA, 18 bp, synthetic construct
  source 1..18: mol_type = other DNA; mol_type = other DNA
ccaactgattcctccccc

SEQ ID NO: 10919 - DNA, 18 bp, synthetic construct
  source 1..18: mol_type = other DNA; mol_type = other DNA
accaactggttcctcccc

SEQ ID NO: 10920 - DNA, 18 bp, synthetic construct
  source 1..18: mol_type = other DNA; mol_type = other DNA
accaactgattcctcccc

SEQ ID NO: 10921 - DNA, 18 bp, synthetic construct
  source 1..18: mol_type = other DNA; mol_type = other DNA
caccaactggttcctccc

SEQ ID NO: 10922 - DNA, 18 bp, synthetic construct
  source 1..18: mol_type = other DNA; mol_type = other DNA
caccaactgattcctccc

SEQ ID NO: 10923 - DNA, 18 bp, synthetic construct
  source 1..18: mol_type = other DNA; mol_type = other DNA
ccaccaactggttcctcc

SEQ ID NO: 10924 - DNA, 18 bp, synthetic construct
  source 1..18: mol_type = other DNA; mol_type = other DNA
ccaccaactgattcctcc

SEQ ID NO: 10925 - DNA, 18 bp, synthetic construct
  source 1..18: mol_type = other DNA; mol_type = other DNA
gccaccaactggttcctc

SEQ ID NO: 10926 - DNA, 18 bp, synthetic construct
  source 1..18: mol_type = other DNA; mol_type = other DNA
gccaccaactgattcctc

SEQ ID NO: 10927 - DNA, 18 bp, synthetic construct
  source 1..18: mol_type = other DNA; mol_type = other DNA
ggccaccaactggttcct

SEQ ID NO: 10928 - DNA, 18 bp, synthetic construct
  source 1..18: mol_type = other DNA; mol_type = other DNA
ggccaccaactgattcct

SEQ ID NO: 10929 - DNA, 18 bp, synthetic construct
  source 1..18: mol_type = other DNA; mol_type = other DNA
aggccaccaactggttcc

SEQ ID NO: 10930 - DNA, 18 bp, synthetic construct
  source 1..18: mol_type = other DNA; mol_type = other DNA
aggccaccaactgattcc

SEQ ID NO: 10931 - DNA, 18 bp, synthetic construct
  source 1..18: mol_type = other DNA; mol_type = other DNA
caggccaccaactggttc

SEQ ID NO: 10932 - DNA, 18 bp, synthetic construct
  source 1..18: mol_type = other DNA; mol_type = other DNA
caggccaccaactgattc

SEQ ID NO: 10933 - DNA, 18 bp, synthetic construct
  source 1..18: mol_type = other DNA; mol_type = other DNA
ccaggccaccaactggtt

SEQ ID NO: 10934 - DNA, 18 bp, synthetic construct
  source 1..18: mol_type = other DNA; mol_type = other DNA
ccaggccaccaactgatt

SEQ ID NO: 10935 - DNA, 18 bp, synthetic construct
  source 1..18: mol_type = other DNA; mol_type = other DNA
cccaggccaccaactggt

SEQ ID NO: 10936 - DNA, 18 bp, synthetic construct
  source 1..18: mol_type = other DNA; mol_type = other DNA
cccaggccaccaactgat

SEQ ID NO: 10937 - DNA, 18 bp, synthetic construct
  source 1..18: mol_type = other DNA; mol_type = other DNA
gcccaggccaccaactgg

SEQ ID NO: 10938 - DNA, 18 bp, synthetic construct
  source 1..18: mol_type = other DNA; mol_type = other DNA
gcccaggccaccaactga

SEQ ID NO: 10939 - DNA, 18 bp, synthetic construct
  source 1..18: mol_type = other DNA; mol_type = other DNA
tgcccaggccaccaactg

SEQ ID NO: 10940 - DNA, 18 bp, synthetic construct
  source 1..18: mol_type = other DNA; mol_type = other DNA
tgcccaggccaccaacta

SEQ ID NO: 10941 - DNA, 18 bp, synthetic construct
  source 1..18: mol_type = other DNA; mol_type = other DNA
ctgcccaggccaccaact

SEQ ID NO: 10942 - DNA, 18 bp, synthetic construct
  source 1..18: mol_type = other DNA; mol_type = other DNA
ctgcccagaccaccaact

SEQ ID NO: 10943 - DNA, 18 bp, synthetic construct
  source 1..18: mol_type = other DNA; mol_type = other DNA
gctgcccaggccaccaac

SEQ ID NO: 10944 - DNA, 18 bp, synthetic construct
  source 1..18: mol_type = other DNA; mol_type = other DNA
gctgcccagaccaccaac

SEQ ID NO: 10945 - DNA, 18 bp, synthetic construct
  source 1..18: mol_type = other DNA; mol_type = other DNA
ggctgcccaggccaccaa

SEQ ID NO: 10946 - DNA, 18 bp, synthetic construct
  source 1..18: mol_type = other DNA; mol_type = other DNA
ggctgcccagaccaccaa

SEQ ID NO: 10947 - DNA, 18 bp, synthetic construct
  source 1..18: mol_type = other DNA; mol_type = other DNA
aggctgcccaggccacca

SEQ ID NO: 10948 - DNA, 18 bp, synthetic construct
  source 1..18: mol_type = other DNA; mol_type = other DNA
aggctgcccagaccacca

SEQ ID NO: 10949 - DNA, 18 bp, synthetic construct
  source 1..18: mol_type = other DNA; mol_type = other DNA
caggctgcccaggccacc

SEQ ID NO: 10950 - DNA, 18 bp, synthetic construct
  source 1..18: mol_type = other DNA; mol_type = other DNA
caggctgcccagaccacc

SEQ ID NO: 10951 - DNA, 18 bp, synthetic construct
  source 1..18: mol_type = other DNA; mol_type = other DNA
gcaggctgcccaggccac

SEQ ID NO: 10952 - DNA, 18 bp, synthetic construct
  source 1..18: mol_type = other DNA; mol_type = other DNA
gcaggctgcccagaccac

SEQ ID NO: 10953 - DNA, 18 bp, synthetic construct
  source 1..18: mol_type = other DNA; mol_type = other DNA
agcaggctgcccaggcca

SEQ ID NO: 10954 - DNA, 18 bp, synthetic construct
  source 1..18: mol_type = other DNA; mol_type = other DNA
agcaggctgcccagacca

SEQ ID NO: 10955 - DNA, 18 bp, synthetic construct
  source 1..18: mol_type = other DNA; mol_type = other DNA
cagcaggctgcccaggcc

SEQ ID NO: 10956 - DNA, 18 bp, synthetic construct
  source 1..18: mol_type = other DNA; mol_type = other DNA
cagcaggctgcccagacc

SEQ ID NO: 10957 - DNA, 18 bp, synthetic construct
  source 1..18: mol_type = other DNA; mol_type = other DNA
ccagcaggctgcccaggc

SEQ ID NO: 10958 - DNA, 18 bp, synthetic construct
  source 1..18: mol_type = other DNA; mol_type = other DNA
ccagcaggctgcccagac

SEQ ID NO: 10959 - DNA, 18 bp, synthetic construct
  source 1..18: mol_type = other DNA; mol_type = other DNA
tccagcaggctgcccagg

SEQ ID NO: 10960 - DNA, 18 bp, synthetic construct
  source 1..18: mol_type = other DNA; mol_type = other DNA
tccagcaggctgcccaga

SEQ ID NO: 10961 - DNA, 18 bp, synthetic construct
  source 1..18: mol_type = other DNA; mol_type = other DNA
gtccagcaggctgcccag

SEQ ID NO: 10962 - DNA, 18 bp, synthetic construct
  source 1..18: mol_type = other DNA; mol_type = other DNA
gtccagcaggctgcccaa

SEQ ID NO: 10963 - DNA, 18 bp, synthetic construct
  source 1..18: mol_type = other DNA; mol_type = other DNA
ggtccagcaggctgccca

SEQ ID NO: 10964 - DNA, 18 bp, synthetic construct
  source 1..18: mol_type = other DNA; mol_type = other DNA
ggtccagcaggctaccca

SEQ ID NO: 10965 - DNA, 18 bp, synthetic construct
  source 1..18: mol_type = other DNA; mol_type = other DNA
gggtccagcaggctgccc

SEQ ID NO: 10966 - DNA, 18 bp, synthetic construct
  source 1..18: mol_type = other DNA; mol_type = other DNA
gggtccagcaggctaccc

SEQ ID NO: 10967 - DNA, 18 bp, synthetic construct
  source 1..18: mol_type = other DNA; mol_type = other DNA
agggtccagcaggctgcc

SEQ ID NO: 10968 - DNA, 18 bp, synthetic construct
  source 1..18: mol_type = other DNA; mol_type = other DNA
agggtccagcaggctacc

SEQ ID NO: 10969 - DNA, 18 bp, synthetic construct
  source 1..18: mol_type = other DNA; mol_type = other DNA
cagggtccagcaggctgc

SEQ ID NO: 10970 - DNA, 18 bp, synthetic construct
  source 1..18: mol_type = other DNA; mol_type = other DNA
cagggtccagcaggctac

SEQ ID NO: 10971 - DNA, 18 bp, synthetic construct
  source 1..18: mol_type = other DNA; mol_type = other DNA
gcagggtccagcaggctg

SEQ ID NO: 10972 - DNA, 18 bp, synthetic construct
  source 1..18: mol_type = other DNA; mol_type = other DNA
gcagggtccagcaggcta

SEQ ID NO: 10973 - DNA, 18 bp, synthetic construct
  source 1..18: mol_type = other DNA; mol_type = other DNA
ggcagggtccagcaggct

SEQ ID NO: 10974 - DNA, 18 bp, synthetic construct
  source 1..18: mol_type = other DNA; mol_type = other DNA
ggcagggtccagcagact

SEQ ID NO: 10975 - DNA, 18 bp, synthetic construct
  source 1..18: mol_type = other DNA; mol_type = other DNA
tggcagggtccagcaggc

SEQ ID NO: 10976 - DNA, 18 bp, synthetic construct
  source 1..18: mol_type = other DNA; mol_type = other DNA
tggcagggtccagcagac

SEQ ID NO: 10977 - DNA, 18 bp, synthetic construct
  source 1..18: mol_type = other DNA; mol_type = other DNA
ttggcagggtccagcagg

SEQ ID NO: 10978 - DNA, 18 bp, synthetic construct
  source 1..18: mol_type = other DNA; mol_type = other DNA
ttggcagggtccagcaga

SEQ ID NO: 10979 - DNA, 18 bp, synthetic construct
  source 1..18: mol_type = other DNA; mol_type = other DNA
cttggcagggtccagcag

SEQ ID NO: 10980 - DNA, 18 bp, synthetic construct
  source 1..18: mol_type = other DNA; mol_type = other DNA
cttggcagggtccagcaa

SEQ ID NO: 10981 - DNA, 18 bp, synthetic construct
  source 1..18: mol_type = other DNA; mol_type = other DNA
tcttggcagggtccagca

SEQ ID NO: 10982 - DNA, 18 bp, synthetic construct
  source 1..18: mol_type = other DNA; mol_type = other DNA
tcttggcagggtccaaca

SEQ ID NO: 10983 - DNA, 18 bp, synthetic construct
  source 1..18: mol_type = other DNA; mol_type = other DNA
ttcttggcagggtccagc

SEQ ID NO: 10984 - DNA, 18 bp, synthetic construct
  source 1..18: mol_type = other DNA; mol_type = other DNA
ttcttggcagggtccaac

SEQ ID NO: 10985 - DNA, 18 bp, synthetic construct
  source 1..18: mol_type = other DNA; mol_type = other DNA
cttcttggcagggtccag

SEQ ID NO: 10986 - DNA, 18 bp, synthetic construct
  source 1..18: mol_type = other DNA; mol_type = other DNA
cttcttggcagggtccaa

SEQ ID NO: 10987 - DNA, 18 bp, synthetic construct
  source 1..18: mol_type = other DNA; mol_type = other DNA
acttcttggcagggtcca

SEQ ID NO: 10988 - DNA, 18 bp, synthetic construct
  source 1..18: mol_type = other DNA; mol_type = other DNA
acttcttggcaggatcca

SEQ ID NO: 10989 - DNA, 18 bp, synthetic construct
  source 1..18: mol_type = other DNA; mol_type = other DNA
gacttcttggcagggtcc

SEQ ID NO: 10990 - DNA, 18 bp, synthetic construct
  source 1..18: mol_type = other DNA; mol_type = other DNA
gacttcttggcaggatcc

SEQ ID NO: 10991 - DNA, 18 bp, synthetic construct
  source 1..18: mol_type = other DNA; mol_type = other DNA
cgacttcttggcagggtc

SEQ ID NO: 10992 - DNA, 18 bp, synthetic construct
  source 1..18: mol_type = other DNA; mol_type = other DNA
cgacttcttggcaggatc

SEQ ID NO: 10993 - DNA, 18 bp, synthetic construct
  source 1..18: mol_type = other DNA; mol_type = other DNA
gcgacttcttggcagggt

SEQ ID NO: 10994 - DNA, 18 bp, synthetic construct
  source 1..18: mol_type = other DNA; mol_type = other DNA
gcgacttcttggcaggat

SEQ ID NO: 10995 - DNA, 18 bp, synthetic construct
  source 1..18: mol_type = other DNA; mol_type = other DNA
ggcgacttcttggcaggg

SEQ ID NO: 10996 - DNA, 18 bp, synthetic construct
  source 1..18: mol_type = other DNA; mol_type = other DNA
ggcgacttcttggcagga

SEQ ID NO: 10997 - DNA, 18 bp, synthetic construct
  source 1..18: mol_type = other DNA; mol_type = other DNA
gggcgacttcttggcagg

SEQ ID NO: 10998 - DNA, 18 bp, synthetic construct
  source 1..18: mol_type = other DNA; mol_type = other DNA
gggcgacttcttggcaga

SEQ ID NO: 10999 - DNA, 18 bp, synthetic construct
  source 1..18: mol_type = other DNA; mol_type = other DNA
tgggcgacttcttggcag

SEQ ID NO: 11000 - DNA, 18 bp, synthetic construct
  source 1..18: mol_type = other DNA; mol_type = other DNA
tgggcgacttcttggcaa

SEQ ID NO: 11001 - DNA, 18 bp, synthetic construct
  source 1..18: mol_type = other DNA; mol_type = other DNA
atgggcgacttcttggca

SEQ ID NO: 11002 - DNA, 18 bp, synthetic construct
  source 1..18: mol_type = other DNA; mol_type = other DNA
atgggcgacttcttgaca

SEQ ID NO: 11003 - DNA, 18 bp, synthetic construct
  source 1..18: mol_type = other DNA; mol_type = other DNA
gatgggcgacttcttggc

SEQ ID NO: 11004 - DNA, 18 bp, synthetic construct
  source 1..18: mol_type = other DNA; mol_type = other DNA
gatgggcgacttcttgac

SEQ ID NO: 11005 - DNA, 18 bp, synthetic construct
  source 1..18: mol_type = other DNA; mol_type = other DNA
cgatgggcgacttcttgg

SEQ ID NO: 11006 - DNA, 18 bp, synthetic construct
  source 1..18: mol_type = other DNA; mol_type = other DNA
cgatgggcgacttcttga

SEQ ID NO: 11007 - DNA, 18 bp, synthetic construct
  source 1..18: mol_type = other DNA; mol_type = other DNA
gcgatgggcgacttcttg

SEQ ID NO: 11008 - DNA, 18 bp, synthetic construct
  source 1..18: mol_type = other DNA; mol_type = other DNA
gcgatgggcgacttctta

SEQ ID NO: 11009 - DNA, 18 bp, synthetic construct
  source 1..18: mol_type = other DNA; mol_type = other DNA
tgcgatgggcgacttctt

SEQ ID NO: 11010 - DNA, 18 bp, synthetic construct
  source 1..18: mol_type = other DNA; mol_type = other DNA
tgcgatgggcaacttctt

SEQ ID NO: 11011 - DNA, 18 bp, synthetic construct
  source 1..18: mol_type = other DNA; mol_type = other DNA
ctgcgatgggcgacttct

SEQ ID NO: 11012 - DNA, 18 bp, synthetic construct
  source 1..18: mol_type = other DNA; mol_type = other DNA
ctgcgatgggcaacttct

SEQ ID NO: 11013 - DNA, 18 bp, synthetic construct
  source 1..18: mol_type = other DNA; mol_type = other DNA
gctgcgatgggcgacttc

SEQ ID NO: 11014 - DNA, 18 bp, synthetic construct
  source 1..18: mol_type = other DNA; mol_type = other DNA
gctgcgatgggcaacttc

SEQ ID NO: 11015 - DNA, 18 bp, synthetic construct
  source 1..18: mol_type = other DNA; mol_type = other DNA
tgctgcgatgggcgactt

SEQ ID NO: 11016 - DNA, 18 bp, synthetic construct
  source 1..18: mol_type = other DNA; mol_type = other DNA
tgctgcgatgggcaactt

SEQ ID NO: 11017 - DNA, 18 bp, synthetic construct
  source 1..18: mol_type = other DNA; mol_type = other DNA
ctgctgcgatgggcgact

SEQ ID NO: 11018 - DNA, 18 bp, synthetic construct
  source 1..18: mol_type = other DNA; mol_type = other DNA
ctgctgcgatgggcaact

SEQ ID NO: 11019 - DNA, 18 bp, synthetic construct
  source 1..18: mol_type = other DNA; mol_type = other DNA
gctgctgcgatgggcgac

SEQ ID NO: 11020 - DNA, 18 bp, synthetic construct
  source 1..18: mol_type = other DNA; mol_type = other DNA
gctgctgcgatgggcaac

SEQ ID NO: 11021 - DNA, 18 bp, synthetic construct
  source 1..18: mol_type = other DNA; mol_type = other DNA
agctgctgcgatgggcga

SEQ ID NO: 11022 - DNA, 18 bp, synthetic construct
  source 1..18: mol_type = other DNA; mol_type = other DNA
agctgctgcgatgggcaa

SEQ ID NO: 11023 - DNA, 18 bp, synthetic construct
  source 1..18: mol_type = other DNA; mol_type = other DNA
gagctgctgcgatgggcg

SEQ ID NO: 11024 - DNA, 18 bp, synthetic construct
  source 1..18: mol_type = other DNA; mol_type = other DNA
gagctgctgcgatgggca

SEQ ID NO: 11025 - DNA, 18 bp, synthetic construct
  source 1..18: mol_type = other DNA; mol_type = other DNA
cgagctgctgcgatgggc

SEQ ID NO: 11026 - DNA, 18 bp, synthetic construct
  source 1..18: mol_type = other DNA; mol_type = other DNA
cgagctgctgcgatggac

SEQ ID NO: 11027 - DNA, 18 bp, synthetic construct
  source 1..18: mol_type = other DNA; mol_type = other DNA
ccgagctgctgcgatggg

SEQ ID NO: 11028 - DNA, 18 bp, synthetic construct
  source 1..18: mol_type = other DNA; mol_type = other DNA
ccgagctgctgcgatgga

SEQ ID NO: 11029 - DNA, 18 bp, synthetic construct
  source 1..18: mol_type = other DNA; mol_type = other DNA
accgagctgctgcgatgg

SEQ ID NO: 11030 - DNA, 18 bp, synthetic construct
  source 1..18: mol_type = other DNA; mol_type = other DNA
accgagctgctgcgatga

SEQ ID NO: 11031 - DNA, 18 bp, synthetic construct
  source 1..18: mol_type = other DNA; mol_type = other DNA
caccgagctgctgcgatg

SEQ ID NO: 11032 - DNA, 18 bp, synthetic construct
  source 1..18: mol_type = other DNA; mol_type = other DNA
caccgagctgctgcgata

SEQ ID NO: 11033 - DNA, 18 bp, synthetic construct
  source 1..18: mol_type = other DNA; mol_type = other DNA
tcaccgagctgctgcgat

SEQ ID NO: 11034 - DNA, 18 bp, synthetic construct
  source 1..18: mol_type = other DNA; mol_type = other DNA
tcaccgagctgctgcaat

SEQ ID NO: 11035 - DNA, 18 bp, synthetic construct
  source 1..18: mol_type = other DNA; mol_type = other DNA
ctcaccgagctgctgcga

SEQ ID NO: 11036 - DNA, 18 bp, synthetic construct
  source 1..18: mol_type = other DNA; mol_type = other DNA
ctcaccgagctgctgcaa

SEQ ID NO: 11037 - DNA, 18 bp, synthetic construct
  source 1..18: mol_type = other DNA; mol_type = other DNA
gctcaccgagctgctgcg

SEQ ID NO: 11038 - DNA, 18 bp, synthetic construct
  source 1..18: mol_type = other DNA; mol_type = other DNA
gctcaccgagctgctgca

SEQ ID NO: 11039 - DNA, 18 bp, synthetic construct
  source 1..18: mol_type = other DNA; mol_type = other DNA
tgctcaccgagctgctgc

SEQ ID NO: 11040 - DNA, 18 bp, synthetic construct
  source 1..18: mol_type = other DNA; mol_type = other DNA
tgctcaccgagctgctac

SEQ ID NO: 11041 - DNA, 18 bp, synthetic construct
  source 1..18: mol_type = other DNA; mol_type = other DNA
ctgctcaccgagctgctg

SEQ ID NO: 11042 - DNA, 18 bp, synthetic construct
  source 1..18: mol_type = other DNA; mol_type = other DNA
ctgctcaccgagctgcta

SEQ ID NO: 11043 - DNA, 18 bp, synthetic construct
  source 1..18: mol_type = other DNA; mol_type = other DNA
cctgctcaccgagctgct

SEQ ID NO: 11044 - DNA, 18 bp, synthetic construct
  source 1..18: mol_type = other DNA; mol_type = other DNA
cctgctcaccgagctact

SEQ ID NO: 11045 - DNA, 18 bp, synthetic construct
  source 1..18: mol_type = other DNA; mol_type = other DNA
ccctgctcaccgagctgc

SEQ ID NO: 11046 - DNA, 18 bp, synthetic construct
  source 1..18: mol_type = other DNA; mol_type = other DNA
ccctgctcaccgagctac

SEQ ID NO: 11047 - DNA, 18 bp, synthetic construct
  source 1..18: mol_type = other DNA; mol_type = other DNA
gccctgctcaccgagctg

SEQ ID NO: 11048 - DNA, 18 bp, synthetic construct
  source 1..18: mol_type = other DNA; mol_type = other DNA
gccctgctcaccgagcta

SEQ ID NO: 11049 - DNA, 18 bp, synthetic construct
  source 1..18: mol_type = other DNA; mol_type = other DNA
cgccctgctcaccgagct

SEQ ID NO: 11050 - DNA, 18 bp, synthetic construct
  source 1..18: mol_type = other DNA; mol_type = other DNA
cgccctgctcaccgaact

SEQ ID NO: 11051 - DNA, 18 bp, synthetic construct
  source 1..18: mol_type = other DNA; mol_type = other DNA
ccgccctgctcaccgagc

SEQ ID NO: 11052 - DNA, 18 bp, synthetic construct
  source 1..18: mol_type = other DNA; mol_type = other DNA
ccgccctgctcaccgaac

SEQ ID NO: 11053 - DNA, 18 bp, synthetic construct
  source 1..18: mol_type = other DNA; mol_type = other DNA
accgccctgctcaccgag

SEQ ID NO: 11054 - DNA, 18 bp, synthetic construct
  source 1..18: mol_type = other DNA; mol_type = other DNA
accgccctgctcaccgaa

SEQ ID NO: 11055 - DNA, 18 bp, synthetic construct
  source 1..18: mol_type = other DNA; mol_type = other DNA
caccgccctgctcaccga

SEQ ID NO: 11056 - DNA, 18 bp, synthetic construct
  source 1..18: mol_type = other DNA; mol_type = other DNA
caccgccctgctcaccaa

SEQ ID NO: 11057 - DNA, 18 bp, synthetic construct
  source 1..18: mol_type = other DNA; mol_type = other DNA
gcaccgccctgctcaccg

SEQ ID NO: 11058 - DNA, 18 bp, synthetic construct
  source 1..18: mol_type = other DNA; mol_type = other DNA
gcaccgccctgctcacca

SEQ ID NO: 11059 - DNA, 18 bp, synthetic construct
  source 1..18: mol_type = other DNA; mol_type = other DNA
cgcaccgccctgctcacc

SEQ ID NO: 11060 - DNA, 18 bp, synthetic construct
  source 1..18: mol_type = other DNA; mol_type = other DNA
cgcaccgccctactcacc

SEQ ID NO: 11061 - DNA, 18 bp, synthetic construct
  source 1..18: mol_type = other DNA; mol_type = other DNA
ccgcaccgccctgctcac

SEQ ID NO: 11062 - DNA, 18 bp, synthetic construct
  source 1..18: mol_type = other DNA; mol_type = other DNA
ccgcaccgccctactcac

SEQ ID NO: 11063 - DNA, 18 bp, synthetic construct
  source 1..18: mol_type = other DNA; mol_type = other DNA
cccgcaccgccctgctca

SEQ ID NO: 11064 - DNA, 18 bp, synthetic construct
  source 1..18: mol_type = other DNA; mol_type = other DNA
cccgcaccgccctactca

SEQ ID NO: 11065 - DNA, 18 bp, synthetic construct
  source 1..18: mol_type = other DNA; mol_type = other DNA
ccccgcaccgccctgctc

SEQ ID NO: 11066 - DNA, 18 bp, synthetic construct
  source 1..18: mol_type = other DNA; mol_type = other DNA
ccccgcaccgccctactc

SEQ ID NO: 11067 - DNA, 18 bp, synthetic construct
  source 1..18: mol_type = other DNA; mol_type = other DNA
tccccgcaccgccctgct

SEQ ID NO: 11068 - DNA, 18 bp, synthetic construct
  source 1..18: mol_type = other DNA; mol_type = other DNA
tccccgcaccgccctact

SEQ ID NO: 11069 - DNA, 18 bp, synthetic construct
  source 1..18: mol_type = other DNA; mol_type = other DNA
ctccccgcaccgccctgc

SEQ ID NO: 11070 - DNA, 18 bp, synthetic construct
  source 1..18: mol_type = other DNA; mol_type = other DNA
ctccccgcaccgccctac

SEQ ID NO: 11071 - DNA, 18 bp, synthetic construct
  source 1..18: mol_type = other DNA; mol_type = other DNA
cctccccgcaccgccctg

SEQ ID NO: 11072 - DNA, 18 bp, synthetic construct
  source 1..18: mol_type = other DNA; mol_type = other DNA
cctccccgcaccgcccta

SEQ ID NO: 11073 - DNA, 18 bp, synthetic construct
  source 1..18: mol_type = other DNA; mol_type = other DNA
ccctccccgcaccgccct

SEQ ID NO: 11074 - DNA, 18 bp, synthetic construct
  source 1..18: mol_type = other DNA; mol_type = other DNA
ccctccccgcaccaccct

SEQ ID NO: 11075 - DNA, 18 bp, synthetic construct
  source 1..18: mol_type = other DNA; mol_type = other DNA
tccctccccgcaccgccc

SEQ ID NO: 11076 - DNA, 18 bp, synthetic construct
  source 1..18: mol_type = other DNA; mol_type = other DNA
tccctccccgcaccaccc

SEQ ID NO: 11077 - DNA, 18 bp, synthetic construct
  source 1..18: mol_type = other DNA; mol_type = other DNA
atccctccccgcaccgcc

SEQ ID NO: 11078 - DNA, 18 bp, synthetic construct
  source 1..18: mol_type = other DNA; mol_type = other DNA
atccctccccgcaccacc

SEQ ID NO: 11079 - DNA, 18 bp, synthetic construct
  source 1..18: mol_type = other DNA; mol_type = other DNA
gatccctccccgcaccgc

SEQ ID NO: 11080 - DNA, 18 bp, synthetic construct
  source 1..18: mol_type = other DNA; mol_type = other DNA
gatccctccccgcaccac

SEQ ID NO: 11081 - DNA, 18 bp, synthetic construct
  source 1..18: mol_type = other DNA; mol_type = other DNA
ggatccctccccgcaccg

SEQ ID NO: 11082 - DNA, 18 bp, synthetic construct
  source 1..18: mol_type = other DNA; mol_type = other DNA
ggatccctccccgcacca

SEQ ID NO: 11083 - DNA, 18 bp, synthetic construct
  source 1..18: mol_type = other DNA; mol_type = other DNA
cggatccctccccgcacc

SEQ ID NO: 11084 - DNA, 18 bp, synthetic construct
  source 1..18: mol_type = other DNA; mol_type = other DNA
cggatccctccccacacc

SEQ ID NO: 11085 - DNA, 18 bp, synthetic construct
  source 1..18: mol_type = other DNA; mol_type = other DNA
acggatccctccccgcac

SEQ ID NO: 11086 - DNA, 18 bp, synthetic construct
  source 1..18: mol_type = other DNA; mol_type = other DNA
acggatccctccccacac

SEQ ID NO: 11087 - DNA, 18 bp, synthetic construct
  source 1..18: mol_type = other DNA; mol_type = other DNA
cacggatccctccccgca

SEQ ID NO: 11088 - DNA, 18 bp, synthetic construct
  source 1..18: mol_type = other DNA; mol_type = other DNA
cacggatccctccccaca

SEQ ID NO: 11089 - DNA, 18 bp, synthetic construct
  source 1..18: mol_type = other DNA; mol_type = other DNA
gcacggatccctccccgc

SEQ ID NO: 11090 - DNA, 18 bp, synthetic construct
  source 1..18: mol_type = other DNA; mol_type = other DNA
gcacggatccctccccac

SEQ ID NO: 11091 - DNA, 18 bp, synthetic construct
  source 1..18: mol_type = other DNA; mol_type = other DNA
ggcacggatccctccccg

SEQ ID NO: 11092 - DNA, 18 bp, synthetic construct
  source 1..18: mol_type = other DNA; mol_type = other DNA
ggcacggatccctcccca

SEQ ID NO: 11093 - DNA, 18 bp, synthetic construct
  source 1..18: mol_type = other DNA; mol_type = other DNA
aggcacggatccctcccc

SEQ ID NO: 11094 - DNA, 18 bp, synthetic construct
  source 1..18: mol_type = other DNA; mol_type = other DNA
aggcacgaatccctcccc

SEQ ID NO: 11095 - DNA, 18 bp, synthetic construct
  source 1..18: mol_type = other DNA; mol_type = other DNA
aaggcacggatccctccc

SEQ ID NO: 11096 - DNA, 18 bp, synthetic construct
  source 1..18: mol_type = other DNA; mol_type = other DNA
aaggcacgaatccctccc

SEQ ID NO: 11097 - DNA, 18 bp, synthetic construct
  source 1..18: mol_type = other DNA; mol_type = other DNA
caaggcacggatccctcc

SEQ ID NO: 11098 - DNA, 18 bp, synthetic construct
  source 1..18: mol_type = other DNA; mol_type = other DNA
caaggcacgaatccctcc

SEQ ID NO: 11099 - DNA, 18 bp, synthetic construct
  source 1..18: mol_type = other DNA; mol_type = other DNA
acaaggcacggatccctc

SEQ ID NO: 11100 - DNA, 18 bp, synthetic construct
  source 1..18: mol_type = other DNA; mol_type = other DNA
acaaggcacgaatccctc

SEQ ID NO: 11101 - DNA, 18 bp, synthetic construct
  source 1..18: mol_type = other DNA; mol_type = other DNA
gacaaggcacggatccct

SEQ ID NO: 11102 - DNA, 18 bp, synthetic construct
  source 1..18: mol_type = other DNA; mol_type = other DNA
gacaaggcacgaatccct

SEQ ID NO: 11103 - DNA, 18 bp, synthetic construct
  source 1..18: mol_type = other DNA; mol_type = other DNA
ggacaaggcacggatccc

SEQ ID NO: 11104 - DNA, 18 bp, synthetic construct
  source 1..18: mol_type = other DNA; mol_type = other DNA
ggacaaggcacgaatccc

SEQ ID NO: 11105 - DNA, 18 bp, synthetic construct
  source 1..18: mol_type = other DNA; mol_type = other DNA
cggacaaggcacggatcc

SEQ ID NO: 11106 - DNA, 18 bp, synthetic construct
  source 1..18: mol_type = other DNA; mol_type = other DNA
cggacaaggcacgaatcc

SEQ ID NO: 11107 - DNA, 18 bp, synthetic construct
  source 1..18: mol_type = other DNA; mol_type = other DNA
acggacaaggcacggatc

SEQ ID NO: 11108 - DNA, 18 bp, synthetic construct
  source 1..18: mol_type = other DNA; mol_type = other DNA
acggacaaggcacgaatc

SEQ ID NO: 11109 - DNA, 18 bp, synthetic construct
  source 1..18: mol_type = other DNA; mol_type = other DNA
cacggacaaggcacggat

SEQ ID NO: 11110 - DNA, 18 bp, synthetic construct
  source 1..18: mol_type = other DNA; mol_type = other DNA
cacggacaaggcacgaat

SEQ ID NO: 11111 - DNA, 18 bp, synthetic construct
  source 1..18: mol_type = other DNA; mol_type = other DNA
ccacggacaaggcacgga

SEQ ID NO: 11112 - DNA, 18 bp, synthetic construct
  source 1..18: mol_type = other DNA; mol_type = other DNA
ccacggacaaggcacgaa

SEQ ID NO: 11113 - DNA, 18 bp, synthetic construct
  source 1..18: mol_type = other DNA; mol_type = other DNA
gccacggacaaggcacgg

SEQ ID NO: 11114 - DNA, 18 bp, synthetic construct
  source 1..18: mol_type = other DNA; mol_type = other DNA
gccacggacaaggcacga

SEQ ID NO: 11115 - DNA, 18 bp, synthetic construct
  source 1..18: mol_type = other DNA; mol_type = other DNA
ggccacggacaaggcacg

SEQ ID NO: 11116 - DNA, 18 bp, synthetic construct
  source 1..18: mol_type = other DNA; mol_type = other DNA
ggccacggacaaggcaca

SEQ ID NO: 11117 - DNA, 18 bp, synthetic construct
  source 1..18: mol_type = other DNA; mol_type = other DNA
gggccacggacaaggcac

SEQ ID NO: 11118 - DNA, 18 bp, synthetic construct
  source 1..18: mol_type = other DNA; mol_type = other DNA
gggccacggacaagacac

SEQ ID NO: 11119 - DNA, 18 bp, synthetic construct
  source 1..18: mol_type = other DNA; mol_type = other DNA
tgggccacggacaaggca

SEQ ID NO: 11120 - DNA, 18 bp, synthetic construct
  source 1..18: mol_type = other DNA; mol_type = other DNA
gtggccacggacaaggca

SEQ ID NO: 11121 - DNA, 18 bp, synthetic construct
  source 1..18: mol_type = other DNA; mol_type = other DNA
ggtgccacggacaaggca

SEQ ID NO: 11122 - DNA, 18 bp, synthetic construct
  source 1..18: mol_type = other DNA; mol_type = other DNA
gggtccacggacaaggca

SEQ ID NO: 11123 - DNA, 18 bp, synthetic construct
  source 1..18: mol_type = other DNA; mol_type = other DNA
ctgggccacggacaaggc

SEQ ID NO: 11124 - DNA, 18 bp, synthetic construct
  source 1..18: mol_type = other DNA; mol_type = other DNA
cgtggccacggacaaggc

SEQ ID NO: 11125 - DNA, 18 bp, synthetic construct
  source 1..18: mol_type = other DNA; mol_type = other DNA
cggtgccacggacaaggc

SEQ ID NO: 11126 - DNA, 18 bp, synthetic construct
  source 1..18: mol_type = other DNA; mol_type = other DNA
cgggtccacggacaaggc

SEQ ID NO: 11127 - DNA, 18 bp, synthetic construct
  source 1..18: mol_type = other DNA; mol_type = other DNA
actgggccacggacaagg

SEQ ID NO: 11128 - DNA, 18 bp, synthetic construct
  source 1..18: mol_type = other DNA; mol_type = other DNA
acgtggccacggacaagg

SEQ ID NO: 11129 - DNA, 18 bp, synthetic construct
  source 1..18: mol_type = other DNA; mol_type = other DNA
acggtgccacggacaagg

SEQ ID NO: 11130 - DNA, 18 bp, synthetic construct
  source 1..18: mol_type = other DNA; mol_type = other DNA
acgggtccacggacaagg

SEQ ID NO: 11131 - DNA, 18 bp, synthetic construct
  source 1..18: mol_type = other DNA; mol_type = other DNA
gactgggccacggacaag

SEQ ID NO: 11132 - DNA, 18 bp, synthetic construct
  source 1..18: mol_type = other DNA; mol_type = other DNA
gacgtggccacggacaag

SEQ ID NO: 11133 - DNA, 18 bp, synthetic construct
  source 1..18: mol_type = other DNA; mol_type = other DNA
gacggtgccacggacaag

SEQ ID NO: 11134 - DNA, 18 bp, synthetic construct
  source 1..18: mol_type = other DNA; mol_type = other DNA
gacgggtccacggacaag

SEQ ID NO: 11135 - DNA, 18 bp, synthetic construct
  source 1..18: mol_type = other DNA; mol_type = other DNA
agactgggccacggacaa

SEQ ID NO: 11136 - DNA, 18 bp, synthetic construct
  source 1..18: mol_type = other DNA; mol_type = other DNA
agacgtggccacggacaa

SEQ ID NO: 11137 - DNA, 18 bp, synthetic construct
  source 1..18: mol_type = other DNA; mol_type = other DNA
agacggtgccacggacaa

SEQ ID NO: 11138 - DNA, 18 bp, synthetic construct
  source 1..18: mol_type = other DNA; mol_type = other DNA
agacgggtccacggacaa

SEQ ID NO: 11139 - DNA, 18 bp, synthetic construct
  source 1..18: mol_type = other DNA; mol_type = other DNA
cagactgggccacggaca

SEQ ID NO: 11140 - DNA, 18 bp, synthetic construct
  source 1..18: mol_type = other DNA; mol_type = other DNA
cagacgtggccacggaca

SEQ ID NO: 11141 - DNA, 18 bp, synthetic construct
  source 1..18: mol_type = other DNA; mol_type = other DNA
cagacggtgccacggaca

SEQ ID NO: 11142 - DNA, 18 bp, synthetic construct
  source 1..18: mol_type = other DNA; mol_type = other DNA
cagacgggtccacggaca

SEQ ID NO: 11143 - DNA, 18 bp, synthetic construct
  source 1..18: mol_type = other DNA; mol_type = other DNA
acagactgggccacggac

SEQ ID NO: 11144 - DNA, 18 bp, synthetic construct
  source 1..18: mol_type = other DNA; mol_type = other DNA
acagacgtggccacggac

SEQ ID NO: 11145 - DNA, 18 bp, synthetic construct
  source 1..18: mol_type = other DNA; mol_type = other DNA
acagacggtgccacggac

SEQ ID NO: 11146 - DNA, 18 bp, synthetic construct
  source 1..18: mol_type = other DNA; mol_type = other DNA
acagacgggtccacggac

SEQ ID NO: 11147 - DNA, 18 bp, synthetic construct
  source 1..18: mol_type = other DNA; mol_type = other DNA
gacagactgggccacgga

SEQ ID NO: 11148 - DNA, 18 bp, synthetic construct
  source 1..18: mol_type = other DNA; mol_type = other DNA
gacagacgtggccacgga

SEQ ID NO: 11149 - DNA, 18 bp, synthetic construct
  source 1..18: mol_type = other DNA; mol_type = other DNA
gacagacggtgccacgga

SEQ ID NO: 11150 - DNA, 18 bp, synthetic construct
  source 1..18: mol_type = other DNA; mol_type = other DNA
gacagacgggtccacgga

SEQ ID NO: 11151 - DNA, 18 bp, synthetic construct
  source 1..18: mol_type = other DNA; mol_type = other DNA
tgacagactgggccacgg

SEQ ID NO: 11152 - DNA, 18 bp, synthetic construct
  source 1..18: mol_type = other DNA; mol_type = other DNA
tgacagacgtggccacgg

SEQ ID NO: 11153 - DNA, 18 bp, synthetic construct
  source 1..18: mol_type = other DNA; mol_type = other DNA
tgacagacggtgccacgg

SEQ ID NO: 11154 - DNA, 18 bp, synthetic construct
  source 1..18: mol_type = other DNA; mol_type = other DNA
tgacagacgggtccacgg

SEQ ID NO: 11155 - DNA, 18 bp, synthetic construct
  source 1..18: mol_type = other DNA; mol_type = other DNA
atgacagactgggccacg

SEQ ID NO: 11156 - DNA, 18 bp, synthetic construct
  source 1..18: mol_type = other DNA; mol_type = other DNA
atgacagacgtggccacg

SEQ ID NO: 11157 - DNA, 18 bp, synthetic construct
  source 1..18: mol_type = other DNA; mol_type = other DNA
atgacagacggtgccacg

SEQ ID NO: 11158 - DNA, 18 bp, synthetic construct
  source 1..18: mol_type = other DNA; mol_type = other DNA
atgacagacgggtccacg

SEQ ID NO: 11159 - DNA, 18 bp, synthetic construct
  source 1..18: mol_type = other DNA; mol_type = other DNA
aatgacagacgggaccac

SEQ ID NO: 11160 - DNA, 18 bp, synthetic construct
  source 1..18: mol_type = other DNA; mol_type = other DNA
aatgacagactgggccac

SEQ ID NO: 11161 - DNA, 18 bp, synthetic construct
  source 1..18: mol_type = other DNA; mol_type = other DNA
aatgacagacgtggccac

SEQ ID NO: 11162 - DNA, 18 bp, synthetic construct
  source 1..18: mol_type = other DNA; mol_type = other DNA
aatgacagacggtgccac

SEQ ID NO: 11163 - DNA, 18 bp, synthetic construct
  source 1..18: mol_type = other DNA; mol_type = other DNA
aatgacagacgggtccac

SEQ ID NO: 11164 - DNA, 18 bp, synthetic construct
  source 1..18: mol_type = other DNA; mol_type = other DNA
gaatgacagacgggacca

SEQ ID NO: 11165 - DNA, 18 bp, synthetic construct
  source 1..18: mol_type = other DNA; mol_type = other DNA
gaatgacagactgggcca

SEQ ID NO: 11166 - DNA, 18 bp, synthetic construct
  source 1..18: mol_type = other DNA; mol_type = other DNA
gaatgacagacgtggcca

SEQ ID NO: 11167 - DNA, 18 bp, synthetic construct
  source 1..18: mol_type = other DNA; mol_type = other DNA
gaatgacagacggtgcca

SEQ ID NO: 11168 - DNA, 18 bp, synthetic construct
  source 1..18: mol_type = other DNA; mol_type = other DNA
gaatgacagacgggtcca

SEQ ID NO: 11169 - DNA, 18 bp, synthetic construct
  source 1..18: mol_type = other DNA; mol_type = other DNA
ggaatgacagacgggacc

SEQ ID NO: 11170 - DNA, 18 bp, synthetic construct
  source 1..18: mol_type = other DNA; mol_type = other DNA
ggaatgacagactgggcc

SEQ ID NO: 11171 - DNA, 18 bp, synthetic construct
  source 1..18: mol_type = other DNA; mol_type = other DNA
ggaatgacagacgtggcc

SEQ ID NO: 11172 - DNA, 18 bp, synthetic construct
  source 1..18: mol_type = other DNA; mol_type = other DNA
ggaatgacagacggtgcc

SEQ ID NO: 11173 - DNA, 18 bp, synthetic construct
  source 1..18: mol_type = other DNA; mol_type = other DNA
ggaatgacagacgggtcc

SEQ ID NO: 11174 - DNA, 18 bp, synthetic construct
  source 1..18: mol_type = other DNA; mol_type = other DNA
aggaatgacagacgggac

SEQ ID NO: 11175 - DNA, 18 bp, synthetic construct
  source 1..18: mol_type = other DNA; mol_type = other DNA
aggaatgacagactgggc

SEQ ID NO: 11176 - DNA, 18 bp, synthetic construct
  source 1..18: mol_type = other DNA; mol_type = other DNA
aggaatgacagacgtggc

SEQ ID NO: 11177 - DNA, 18 bp, synthetic construct
  source 1..18: mol_type = other DNA; mol_type = other DNA
aggaatgacagacggtgc

SEQ ID NO: 11178 - DNA, 18 bp, synthetic construct
  source 1..18: mol_type = other DNA; mol_type = other DNA
aggaatgacagacgggtc

SEQ ID NO: 11179 - DNA, 18 bp, synthetic construct
  source 1..18: mol_type = other DNA; mol_type = other DNA
gaggaatgacagacggga

SEQ ID NO: 11180 - DNA, 18 bp, synthetic construct
  source 1..18: mol_type = other DNA; mol_type = other DNA
gaggaatgacagactggg

SEQ ID NO: 11181 - DNA, 18 bp, synthetic construct
  source 1..18: mol_type = other DNA; mol_type = other DNA
gaggaatgacagacgtgg

SEQ ID NO: 11182 - DNA, 18 bp, synthetic construct
  source 1..18: mol_type = other DNA; mol_type = other DNA
gaggaatgacagacggtg

SEQ ID NO: 11183 - DNA, 18 bp, synthetic construct
  source 1..18: mol_type = other DNA; mol_type = other DNA
gaggaatgacagacgggt

SEQ ID NO: 11184 - DNA, 18 bp, synthetic construct
  source 1..18: mol_type = other DNA; mol_type = other DNA
agaggaatgacagacggg

SEQ ID NO: 11185 - DNA, 18 bp, synthetic construct
  source 1..18: mol_type = other DNA; mol_type = other DNA
agaggaatgacagacgga

SEQ ID NO: 11186 - DNA, 18 bp, synthetic construct
  source 1..18: mol_type = other DNA; mol_type = other DNA
aagaggaatgacagacgg

SEQ ID NO: 11187 - DNA, 18 bp, synthetic construct
  source 1..18: mol_type = other DNA; mol_type = other DNA
aagaggaatgacagacga

SEQ ID NO: 11188 - DNA, 18 bp, synthetic construct
  source 1..18: mol_type = other DNA; mol_type = other DNA
caagaggaatgacagacg

SEQ ID NO: 11189 - DNA, 18 bp, synthetic construct
  source 1..18: mol_type = other DNA; mol_type = other DNA
caagaggaatgacagaca

SEQ ID NO: 11190 - DNA, 18 bp, synthetic construct
  source 1..18: mol_type = other DNA; mol_type = other DNA
acaagaggaatgacagac

SEQ ID NO: 11191 - DNA, 18 bp, synthetic construct
  source 1..18: mol_type = other DNA; mol_type = other DNA
acaagaggaatgacaaac

SEQ ID NO: 11192 - DNA, 18 bp, synthetic construct
  source 1..18: mol_type = other DNA; mol_type = other DNA
gacaagaggaatgacaga

SEQ ID NO: 11193 - DNA, 18 bp, synthetic construct
  source 1..18: mol_type = other DNA; mol_type = other DNA
gacaagaggaatgacaaa

SEQ ID NO: 11194 - DNA, 18 bp, synthetic construct
  source 1..18: mol_type = other DNA; mol_type = other DNA
agacaagaggaatgacag

SEQ ID NO: 11195 - DNA, 18 bp, synthetic construct
  source 1..18: mol_type = other DNA; mol_type = other DNA
agacaagaggaatgacaa

SEQ ID NO: 11196 - DNA, 18 bp, synthetic construct
  source 1..18: mol_type = other DNA; mol_type = other DNA
cagacaagaggaatgaca

SEQ ID NO: 11197 - DNA, 18 bp, synthetic construct
  source 1..18: mol_type = other DNA; mol_type = other DNA
cagacaagaggaataaca

SEQ ID NO: 11198 - DNA, 18 bp, synthetic construct
  source 1..18: mol_type = other DNA; mol_type = other DNA
acagacaagaggaatgac

SEQ ID NO: 11199 - DNA, 18 bp, synthetic construct
  source 1..18: mol_type = other DNA; mol_type = other DNA
acagacaagaggaataac

SEQ ID NO: 11200 - DNA, 18 bp, synthetic construct
  source 1..18: mol_type = other DNA; mol_type = other DNA
aacagacaagaggaatga

SEQ ID NO: 11201 - DNA, 18 bp, synthetic construct
  source 1..18: mol_type = other DNA; mol_type = other DNA
aacagacaagaggaataa

SEQ ID NO: 11202 - DNA, 18 bp, synthetic construct
  source 1..18: mol_type = other DNA; mol_type = other DNA
gaacagacaagaggaatg

SEQ ID NO: 11203 - DNA, 18 bp, synthetic construct
  source 1..18: mol_type = other DNA; mol_type = other DNA
gaacagacaagaggaata

SEQ ID NO: 11204 - DNA, 18 bp, synthetic construct
  source 1..18: mol_type = other DNA; mol_type = other DNA
agaacagacaagaggaat

SEQ ID NO: 11205 - DNA, 18 bp, synthetic construct
  source 1..18: mol_type = other DNA; mol_type = other DNA
agaacagacaagagaaat

SEQ ID NO: 11206 - DNA, 18 bp, synthetic construct
  source 1..18: mol_type = other DNA; mol_type = other DNA
gagaacagacaagaggaa

SEQ ID NO: 11207 - DNA, 18 bp, synthetic construct
  source 1..18: mol_type = other DNA; mol_type = other DNA
gagaacagacaagagaaa

SEQ ID NO: 11208 - DNA, 18 bp, synthetic construct
  source 1..18: mol_type = other DNA; mol_type = other DNA
agagaacagacaagagga

SEQ ID NO: 11209 - DNA, 18 bp, synthetic construct
  source 1..18: mol_type = other DNA; mol_type = other DNA
agagaacagacaagagaa

SEQ ID NO: 11210 - DNA, 18 bp, synthetic construct
  source 1..18: mol_type = other DNA; mol_type = other DNA
cagagaacagacaagagg

SEQ ID NO: 11211 - DNA, 18 bp, synthetic construct
  source 1..18: mol_type = other DNA; mol_type = other DNA
cagagaacagacaagaga

SEQ ID NO: 11212 - DNA, 18 bp, synthetic construct
  source 1..18: mol_type = other DNA; mol_type = other DNA
ccagagaacagacaagag

SEQ ID NO: 11213 - DNA, 18 bp, synthetic construct
  source 1..18: mol_type = other DNA; mol_type = other DNA
ccagagaacagacaagaa

SEQ ID NO: 11214 - DNA, 18 bp, synthetic construct
  source 1..18: mol_type = other DNA; mol_type = other DNA
gccagagaacagacaaga

SEQ ID NO: 11215 - DNA, 18 bp, synthetic construct
  source 1..18: mol_type = other DNA; mol_type = other DNA
gccagagaacagacaaaa

SEQ ID NO: 11216 - DNA, 18 bp, synthetic construct
  source 1..18: mol_type = other DNA; mol_type = other DNA
agccagagaacagacaag

SEQ ID NO: 11217 - DNA, 18 bp, synthetic construct
  source 1..18: mol_type = other DNA; mol_type = other DNA
agccagagaacagacaaa

SEQ ID NO: 11218 - DNA, 18 bp, synthetic construct
  source 1..18: mol_type = other DNA; mol_type = other DNA
gagccagagaacagacaa

SEQ ID NO: 11219 - DNA, 18 bp, synthetic construct
  source 1..18: mol_type = other DNA; mol_type = other DNA
gagccagagaacaaacaa

SEQ ID NO: 11220 - DNA, 18 bp, synthetic construct
  source 1..18: mol_type = other DNA; mol_type = other DNA
agagccagagaacagaca

SEQ ID NO: 11221 - DNA, 18 bp, synthetic construct
  source 1..18: mol_type = other DNA; mol_type = other DNA
agagccagagaacaaaca

SEQ ID NO: 11222 - DNA, 18 bp, synthetic construct
  source 1..18: mol_type = other DNA; mol_type = other DNA
gagagccagagaacagac

SEQ ID NO: 11223 - DNA, 18 bp, synthetic construct
  source 1..18: mol_type = other DNA; mol_type = other DNA
gagagccagagaacaaac

SEQ ID NO: 11224 - DNA, 18 bp, synthetic construct
  source 1..18: mol_type = other DNA; mol_type = other DNA
ggagagccagagaacaga

SEQ ID NO: 11225 - DNA, 18 bp, synthetic construct
  source 1..18: mol_type = other DNA; mol_type = other DNA
ggagagccagagaacaaa

SEQ ID NO: 11226 - DNA, 18 bp, synthetic construct
  source 1..18: mol_type = other DNA; mol_type = other DNA
aggagagccagagaacag

SEQ ID NO: 11227 - DNA, 18 bp, synthetic construct
  source 1..18: mol_type = other DNA; mol_type = other DNA
aggagagccagagaacaa

SEQ ID NO: 11228 - DNA, 18 bp, synthetic construct
  source 1..18: mol_type = other DNA; mol_type = other DNA
caggagagccagagaaca

SEQ ID NO: 11229 - DNA, 18 bp, synthetic construct
  source 1..18: mol_type = other DNA; mol_type = other DNA
caggagagccagaaaaca

SEQ ID NO: 11230 - DNA, 18 bp, synthetic construct
  source 1..18: mol_type = other DNA; mol_type = other DNA
acaggagagccagagaac

SEQ ID NO: 11231 - DNA, 18 bp, synthetic construct
  source 1..18: mol_type = other DNA; mol_type = other DNA
acaggagagccagaaaac

SEQ ID NO: 11232 - DNA, 18 bp, synthetic construct
  source 1..18: mol_type = other DNA
aacaggagagccagagaa

SEQ ID NO: 11233 - DNA, 18 bp, synthetic construct
  source 1..18: mol_type = other DNA
aacaggagagccagaaaa

SEQ ID NO: 11234 - DNA, 18 bp, synthetic construct
  source 1..18: mol_type = other DNA
gaacaggagagccagaga

SEQ ID NO: 11235 - DNA, 18 bp, synthetic construct
  source 1..18: mol_type = other DNA
gaacaggagagccagaaa

SEQ ID NO: 11236 - DNA, 18 bp, synthetic construct
  source 1..18: mol_type = other DNA
ggaacaggagagccagag

SEQ ID NO: 11237 - DNA, 18 bp, synthetic construct
  source 1..18: mol_type = other DNA
ggaacaggagagccagaa

SEQ ID NO: 11238 - DNA, 18 bp, synthetic construct
  source 1..18: mol_type = other DNA
aggaacaggagagccaga

SEQ ID NO: 11239 - DNA, 18 bp, synthetic construct
  source 1..18: mol_type = other DNA
aggaacaggagagccaaa

SEQ ID NO: 11240 - DNA, 18 bp, synthetic construct
  source 1..18: mol_type = other DNA
gaggaacaggagagccag

SEQ ID NO: 11241 - DNA, 18 bp, synthetic construct
  source 1..18: mol_type = other DNA
gaggaacaggagagccaa

SEQ ID NO: 11242 - DNA, 18 bp, synthetic construct
  source 1..18: mol_type = other DNA
ggaggaacaggagagcca

SEQ ID NO: 11243 - DNA, 18 bp, synthetic construct
  source 1..18: mol_type = other DNA
ggaggaacaggagaacca

SEQ ID NO: 11244 - DNA, 18 bp, synthetic construct
  source 1..18: mol_type = other DNA
aggaggaacaggagagcc

SEQ ID NO: 11245 - DNA, 18 bp, synthetic construct
  source 1..18: mol_type = other DNA
aggaggaacaggagaacc

SEQ ID NO: 11246 - DNA, 18 bp, synthetic construct
  source 1..18: mol_type = other DNA
aaggaggaacaggagagc

SEQ ID NO: 11247 - DNA, 18 bp, synthetic construct
  source 1..18: mol_type = other DNA
aaggaggaacaggagaac

SEQ ID NO: 11248 - DNA, 18 bp, synthetic construct
  source 1..18: mol_type = other DNA
caaggaggaacaggagag

SEQ ID NO: 11249 - DNA, 18 bp, synthetic construct
  source 1..18: mol_type = other DNA
caaggaggaacaggagaa

SEQ ID NO: 11250 - DNA, 18 bp, synthetic construct
  source 1..18: mol_type = other DNA
acaaggaggaacaggaga

SEQ ID NO: 11251 - DNA, 18 bp, synthetic construct
  source 1..18: mol_type = other DNA
acaaggaggaacaggaaa

SEQ ID NO: 11252 - DNA, 18 bp, synthetic construct
  source 1..18: mol_type = other DNA
aacaaggaggaacaggag

SEQ ID NO: 11253 - DNA, 18 bp, synthetic construct
  source 1..18: mol_type = other DNA
aacaaggaggaacaggaa

SEQ ID NO: 11254 - DNA, 18 bp, synthetic construct
  source 1..18: mol_type = other DNA
gaacaaggaggaacagga

SEQ ID NO: 11255 - DNA, 18 bp, synthetic construct
  source 1..18: mol_type = other DNA
gaacaaggaggaacagaa

SEQ ID NO: 11256 - DNA, 18 bp, synthetic construct
  source 1..18: mol_type = other DNA
agaacaaggaggaacagg

SEQ ID NO: 11257 - DNA, 18 bp, synthetic construct
  source 1..18: mol_type = other DNA
agaacaaggaggaacaga

SEQ ID NO: 11258 - DNA, 18 bp, synthetic construct
  source 1..18: mol_type = other DNA
cagaacaaggaggaacag

SEQ ID NO: 11259 - DNA, 18 bp, synthetic construct
  source 1..18: mol_type = other DNA
cagaacaaggaggaacaa

SEQ ID NO: 11260 - DNA, 18 bp, synthetic construct
  source 1..18: mol_type = other DNA
acagaacaaggaggaaca

SEQ ID NO: 11261 - DNA, 18 bp, synthetic construct
  source 1..18: mol_type = other DNA
acagaacaaggagaaaca

SEQ ID NO: 11262 - DNA, 18 bp, synthetic construct
  source 1..18: mol_type = other DNA
gcatttgcattttgcttt

SEQ ID NO: 11263 - DNA, 18 bp, synthetic construct
  source 1..18: mol_type = other DNA
gcatttgcattttacttt

SEQ ID NO: 11264 - DNA, 18 bp, synthetic construct
  source 1..18: mol_type = other DNA
agcatttgcattttgctt

SEQ ID NO: 11265 - DNA, 18 bp, synthetic construct
  source 1..18: mol_type = other DNA
agcatttgcattttactt

SEQ ID NO: 11266 - DNA, 18 bp, synthetic construct
  source 1..18: mol_type = other DNA
cagcatttgcattttgct

SEQ ID NO: 11267 - DNA, 18 bp, synthetic construct
  source 1..18: mol_type = other DNA
cagcatttgcattttact

SEQ ID NO: 11268 - DNA, 18 bp, synthetic construct
  source 1..18: mol_type = other DNA
acagcatttgcattttgc

SEQ ID NO: 11269 - DNA, 18 bp, synthetic construct
  source 1..18: mol_type = other DNA; mol_type = other DNA
acagcatttgcattttac

SEQ ID NO: 11270 - DNA, 18 bp, synthetic construct
  source 1..18: mol_type = other DNA; mol_type = other DNA
cacagcatttgcattttg

SEQ ID NO: 11271 - DNA, 18 bp, synthetic construct
  source 1..18: mol_type = other DNA; mol_type = other DNA
cacagcatttgcatttta

SEQ ID NO: 11272 - DNA, 18 bp, synthetic construct
  source 1..18: mol_type = other DNA; mol_type = other DNA
acacagcatttgcatttt

SEQ ID NO: 11273 - DNA, 18 bp, synthetic construct
  source 1..18: mol_type = other DNA; mol_type = other DNA
acacagcatttacatttt

SEQ ID NO: 11274 - DNA, 18 bp, synthetic construct
  source 1..18: mol_type = other DNA; mol_type = other DNA
aacacagcatttgcattt

SEQ ID NO: 11275 - DNA, 18 bp, synthetic construct
  source 1..18: mol_type = other DNA; mol_type = other DNA
aacacagcatttacattt

SEQ ID NO: 11276 - DNA, 18 bp, synthetic construct
  source 1..18: mol_type = other DNA; mol_type = other DNA
aaacacagcatttgcatt

SEQ ID NO: 11277 - DNA, 18 bp, synthetic construct
  source 1..18: mol_type = other DNA; mol_type = other DNA
aaacacagcatttacatt

SEQ ID NO: 11278 - DNA, 18 bp, synthetic construct
  source 1..18: mol_type = other DNA; mol_type = other DNA
aaaacacagcatttgcat

SEQ ID NO: 11279 - DNA, 18 bp, synthetic construct
  source 1..18: mol_type = other DNA; mol_type = other DNA
aaaacacagcatttacat

SEQ ID NO: 11280 - DNA, 18 bp, synthetic construct
  source 1..18: mol_type = other DNA; mol_type = other DNA
caaaacacagcatttgca

SEQ ID NO: 11281 - DNA, 18 bp, synthetic construct
  source 1..18: mol_type = other DNA; mol_type = other DNA
caaaacacagcatttaca

SEQ ID NO: 11282 - DNA, 18 bp, synthetic construct
  source 1..18: mol_type = other DNA; mol_type = other DNA
acaaaacacagcatttgc

SEQ ID NO: 11283 - DNA, 18 bp, synthetic construct
  source 1..18: mol_type = other DNA; mol_type = other DNA
acaaaacacagcatttac

SEQ ID NO: 11284 - DNA, 18 bp, synthetic construct
  source 1..18: mol_type = other DNA; mol_type = other DNA
cacaaaacacagcatttg

SEQ ID NO: 11285 - DNA, 18 bp, synthetic construct
  source 1..18: mol_type = other DNA; mol_type = other DNA
cacaaaacacagcattta

SEQ ID NO: 11286 - DNA, 18 bp, synthetic construct
  source 1..18: mol_type = other DNA; mol_type = other DNA
tcacaaaacacagcattt

SEQ ID NO: 11287 - DNA, 18 bp, synthetic construct
  source 1..18: mol_type = other DNA; mol_type = other DNA
tcacaaaacacaacattt

SEQ ID NO: 11288 - DNA, 18 bp, synthetic construct
  source 1..18: mol_type = other DNA; mol_type = other DNA
atcacaaaacacagcatt

SEQ ID NO: 11289 - DNA, 18 bp, synthetic construct
  source 1..18: mol_type = other DNA; mol_type = other DNA
atcacaaaacacaacatt

SEQ ID NO: 11290 - DNA, 18 bp, synthetic construct
  source 1..18: mol_type = other DNA; mol_type = other DNA
aatcacaaaacacagcat

SEQ ID NO: 11291 - DNA, 18 bp, synthetic construct
  source 1..18: mol_type = other DNA; mol_type = other DNA
aatcacaaaacacaacat

SEQ ID NO: 11292 - DNA, 18 bp, synthetic construct
  source 1..18: mol_type = other DNA; mol_type = other DNA
aaatcacaaaacacagca

SEQ ID NO: 11293 - DNA, 18 bp, synthetic construct
  source 1..18: mol_type = other DNA; mol_type = other DNA
aaatcacaaaacacaaca

SEQ ID NO: 11294 - DNA, 18 bp, synthetic construct
  source 1..18: mol_type = other DNA; mol_type = other DNA
caaatcacaaaacacagc

SEQ ID NO: 11295 - DNA, 18 bp, synthetic construct
  source 1..18: mol_type = other DNA; mol_type = other DNA
caaatcacaaaacacaac

SEQ ID NO: 11296 - DNA, 18 bp, synthetic construct
  source 1..18: mol_type = other DNA; mol_type = other DNA
tcaaatcacaaaacacag

SEQ ID NO: 11297 - DNA, 18 bp, synthetic construct
  source 1..18: mol_type = other DNA; mol_type = other DNA
tcaaatcacaaaacacaa

SEQ ID NO: 11298 - DNA, 18 bp, synthetic construct
  source 1..18: mol_type = other DNA; mol_type = other DNA
ctcaaatcacaaaacaca

SEQ ID NO: 11299 - DNA, 18 bp, synthetic construct
  source 1..18: mol_type = other DNA; mol_type = other DNA
tctcaaatcacaaaacac

SEQ ID NO: 11300 - DNA, 18 bp, synthetic construct
  source 1..18: mol_type = other DNA; mol_type = other DNA
atctcaaatcacaaaaca

SEQ ID NO: 11301 - DNA, 18 bp, synthetic construct
  source 1..18: mol_type = other DNA; mol_type = other DNA
gatctcaaatcacaaaac

SEQ ID NO: 11302 - DNA, 18 bp, synthetic construct
  source 1..18: mol_type = other DNA; mol_type = other DNA
aatctcaaatcacaaaac

SEQ ID NO: 11303 - DNA, 18 bp, synthetic construct
  source 1..18: mol_type = other DNA; mol_type = other DNA
agatctcaaatcacaaaa

SEQ ID NO: 11304 - DNA, 18 bp, synthetic construct
  source 1..18: mol_type = other DNA; mol_type = other DNA
aaatctcaaatcacaaaa

SEQ ID NO: 11305 - DNA, 18 bp, synthetic construct
  source 1..18: mol_type = other DNA; mol_type = other DNA
tagatctcaaatcacaaa

SEQ ID NO: 11306 - DNA, 18 bp, synthetic construct
  source 1..18: mol_type = other DNA; mol_type = other DNA
taaatctcaaatcacaaa

SEQ ID NO: 11307 - DNA, 18 bp, synthetic construct
  source 1..18: mol_type = other DNA; mol_type = other DNA
ctagatctcaaatcacaa

SEQ ID NO: 11308 - DNA, 18 bp, synthetic construct
  source 1..18: mol_type = other DNA; mol_type = other DNA
ctaaatctcaaatcacaa

SEQ ID NO: 11309 - DNA, 18 bp, synthetic construct
  source 1..18: mol_type = other DNA; mol_type = other DNA
cctagatctcaaatcaca

SEQ ID NO: 11310 - DNA, 18 bp, synthetic construct
  source 1..18: mol_type = other DNA; mol_type = other DNA
cctaaatctcaaatcaca

SEQ ID NO: 11311 - DNA, 18 bp, synthetic construct
  source 1..18: mol_type = other DNA; mol_type = other DNA
ccctagatctcaaatcac

SEQ ID NO: 11312 - DNA, 18 bp, synthetic construct
  source 1..18: mol_type = other DNA; mol_type = other DNA
ccctaaatctcaaatcac

SEQ ID NO: 11313 - DNA, 18 bp, synthetic construct
  source 1..18: mol_type = other DNA; mol_type = other DNA
tccctagatctcaaatca

SEQ ID NO: 11314 - DNA, 18 bp, synthetic construct
  source 1..18: mol_type = other DNA; mol_type = other DNA
tccctaaatctcaaatca

SEQ ID NO: 11315 - DNA, 18 bp, synthetic construct
  source 1..18: mol_type = other DNA; mol_type = other DNA
ctccctagatctcaaatc

SEQ ID NO: 11316 - DNA, 18 bp, synthetic construct
  source 1..18: mol_type = other DNA; mol_type = other DNA
ctccctaaatctcaaatc

SEQ ID NO: 11317 - DNA, 18 bp, synthetic construct
  source 1..18: mol_type = other DNA; mol_type = other DNA
cctccctagatctcaaat

SEQ ID NO: 11318 - DNA, 18 bp, synthetic construct
  source 1..18: mol_type = other DNA; mol_type = other DNA
cctccctaaatctcaaat

SEQ ID NO: 11319 - DNA, 18 bp, synthetic construct
  source 1..18: mol_type = other DNA; mol_type = other DNA
acctccctagatctcaaa

SEQ ID NO: 11320 - DNA, 18 bp, synthetic construct
  source 1..18: mol_type = other DNA; mol_type = other DNA
acctccctaaatctcaaa

SEQ ID NO: 11321 - DNA, 18 bp, synthetic construct
  source 1..18: mol_type = other DNA; mol_type = other DNA
cacctccctagatctcaa

SEQ ID NO: 11322 - DNA, 18 bp, synthetic construct
  source 1..18: mol_type = other DNA; mol_type = other DNA
cacctccctaaatctcaa

SEQ ID NO: 11323 - DNA, 18 bp, synthetic construct
  source 1..18: mol_type = other DNA; mol_type = other DNA
ccacctccctagatctca

SEQ ID NO: 11324 - DNA, 18 bp, synthetic construct
  source 1..18: mol_type = other DNA; mol_type = other DNA
ccacctccctaaatctca

SEQ ID NO: 11325 - DNA, 18 bp, synthetic construct
  source 1..18: mol_type = other DNA; mol_type = other DNA
gccacctccctagatctc

SEQ ID NO: 11326 - DNA, 18 bp, synthetic construct
  source 1..18: mol_type = other DNA; mol_type = other DNA
gccacctccctaaatctc

SEQ ID NO: 11327 - DNA, 18 bp, synthetic construct
  source 1..18: mol_type = other DNA; mol_type = other DNA
agccacctccctagatct

SEQ ID NO: 11328 - DNA, 18 bp, synthetic construct
  source 1..18: mol_type = other DNA; mol_type = other DNA
agccacctccctaaatct

SEQ ID NO: 11329 - DNA, 18 bp, synthetic construct
  source 1..18: mol_type = other DNA; mol_type = other DNA
aagccacctccctagatc

SEQ ID NO: 11330 - DNA, 18 bp, synthetic construct
  source 1..18: mol_type = other DNA; mol_type = other DNA
aagccacctccctaaatc

SEQ ID NO: 11331 - DNA, 18 bp, synthetic construct
  source 1..18: mol_type = other DNA; mol_type = other DNA
taagccacctccctagat

SEQ ID NO: 11332 - DNA, 18 bp, synthetic construct
  source 1..18: mol_type = other DNA; mol_type = other DNA
taagccacctccctaaat

SEQ ID NO: 11333 - DNA, 18 bp, synthetic construct
  source 1..18: mol_type = other DNA; mol_type = other DNA
ctaagccacctccctaga

SEQ ID NO: 11334 - DNA, 18 bp, synthetic construct
  source 1..18: mol_type = other DNA; mol_type = other DNA
ctaagccacctccctaaa

SEQ ID NO: 11335 - DNA, 18 bp, synthetic construct
  source 1..18: mol_type = other DNA; mol_type = other DNA
cctaagccacctccctag

SEQ ID NO: 11336 - DNA, 18 bp, synthetic construct
  source 1..18: mol_type = other DNA; mol_type = other DNA
cctaagccacctccctaa

SEQ ID NO: 11337 - DNA, 18 bp, synthetic construct
  source 1..18: mol_type = other DNA; mol_type = other DNA
tcctaagccacctcccta

SEQ ID NO: 11338 - DNA, 18 bp, synthetic construct
  source 1..18: mol_type = other DNA; mol_type = other DNA
tcctaaaccacctcccta

SEQ ID NO: 11339 - DNA, 18 bp, synthetic construct
  source 1..18: mol_type = other DNA; mol_type = other DNA
gtcctaagccacctccct

SEQ ID NO: 11340 - DNA, 18 bp, synthetic construct
  source 1..18: mol_type = other DNA; mol_type = other DNA
gtcctaaaccacctccct

SEQ ID NO: 11341 - DNA, 18 bp, synthetic construct
  source 1..18: mol_type = other DNA; mol_type = other DNA
tgtcctaagccacctccc

SEQ ID NO: 11342 - DNA, 18 bp, synthetic construct
  source 1..18: mol_type = other DNA; mol_type = other DNA
tgtcctaaaccacctccc

SEQ ID NO: 11343 - DNA, 18 bp, synthetic construct
  source 1..18: mol_type = other DNA; mol_type = other DNA
ttgtcctaagccacctcc

SEQ ID NO: 11344 - DNA, 18 bp, synthetic construct
  source 1..18: mol_type = other DNA; mol_type = other DNA
ttgtcctaaaccacctcc

SEQ ID NO: 11345 - DNA, 18 bp, synthetic construct
  source 1..18: mol_type = other DNA; mol_type = other DNA
tttgtcctaagccacctc

SEQ ID NO: 11346 - DNA, 18 bp, synthetic construct
  source 1..18: mol_type = other DNA; mol_type = other DNA
tttgtcctaaaccacctc

SEQ ID NO: 11347 - DNA, 18 bp, synthetic construct
  source 1..18: mol_type = other DNA; mol_type = other DNA
ttttgtcctaagccacct

SEQ ID NO: 11348 - DNA, 18 bp, synthetic construct
  source 1..18: mol_type = other DNA; mol_type = other DNA
ttttgtcctaaaccacct

SEQ ID NO: 11349 - DNA, 18 bp, synthetic construct
  source 1..18: mol_type = other DNA; mol_type = other DNA
tttttgtcctaagccacc

SEQ ID NO: 11350 - DNA, 18 bp, synthetic construct
  source 1..18: mol_type = other DNA; mol_type = other DNA
tttttgtcctaaaccacc

SEQ ID NO: 11351 - DNA, 18 bp, synthetic construct
  source 1..18: mol_type = other DNA; mol_type = other DNA
gtttttgtcctaagccac

SEQ ID NO: 11352 - DNA, 18 bp, synthetic construct
  source 1..18: mol_type = other DNA; mol_type = other DNA
gtttttgtcctaaaccac

SEQ ID NO: 11353 - DNA, 18 bp, synthetic construct
  source 1..18: mol_type = other DNA; mol_type = other DNA
ggtttttgtcctaagcca

SEQ ID NO: 11354 - DNA, 18 bp, synthetic construct
  source 1..18: mol_type = other DNA; mol_type = other DNA
ggtttttgtcctaaacca

SEQ ID NO: 11355 - DNA, 18 bp, synthetic construct
  source 1..18: mol_type = other DNA; mol_type = other DNA
gggtttttgtcctaagcc

SEQ ID NO: 11356 - DNA, 18 bp, synthetic construct
  source 1..18: mol_type = other DNA; mol_type = other DNA
gggtttttgtcctaaacc

SEQ ID NO: 11357 - DNA, 18 bp, synthetic construct
  source 1..18: mol_type = other DNA; mol_type = other DNA
tgggtttttgtcctaagc

SEQ ID NO: 11358 - DNA, 18 bp, synthetic construct
  source 1..18: mol_type = other DNA; mol_type = other DNA
tgggtttttgtcctaaac

SEQ ID NO: 11359 - DNA, 18 bp, synthetic construct
  source 1..18: mol_type = other DNA; mol_type = other DNA
gtgggtttttgtcctaag

SEQ ID NO: 11360 - DNA, 18 bp, synthetic construct
  source 1..18: mol_type = other DNA; mol_type = other DNA
gtgggtttttgtcctaaa

SEQ ID NO: 11361 - DNA, 18 bp, synthetic construct
  source 1..18: mol_type = other DNA; mol_type = other DNA
tgtgggtttttgtcctaa

SEQ ID NO: 11362 - DNA, 18 bp, synthetic construct
  source 1..18: mol_type = other DNA; mol_type = other DNA
tgtgggtttttatcctaa

SEQ ID NO: 11363 - DNA, 18 bp, synthetic construct
  source 1..18: mol_type = other DNA; mol_type = other DNA
ctgtgggtttttgtccta

SEQ ID NO: 11364 - DNA, 18 bp, synthetic construct
  source 1..18: mol_type = other DNA; mol_type = other DNA
ctgtgggtttttatccta

SEQ ID NO: 11365 - DNA, 18 bp, synthetic construct
  source 1..18: mol_type = other DNA; mol_type = other DNA
tctgtgggtttttgtcct

SEQ ID NO: 11366 - DNA, 18 bp, synthetic construct
  source 1..18: mol_type = other DNA; mol_type = other DNA
tctgtgggtttttatcct

SEQ ID NO: 11367 - DNA, 18 bp, synthetic construct
  source 1..18: mol_type = other DNA; mol_type = other DNA
ttctgtgggtttttgtcc

SEQ ID NO: 11368 - DNA, 18 bp, synthetic construct
  source 1..18: mol_type = other DNA; mol_type = other DNA
ttctgtgggtttttatcc

SEQ ID NO: 11369 - DNA, 18 bp, synthetic construct
  source 1..18: mol_type = other DNA; mol_type = other DNA
cttctgtgggtttttgtc

SEQ ID NO: 11370 - DNA, 18 bp, synthetic construct
  source 1..18: mol_type = other DNA; mol_type = other DNA
cttctgtgggtttttatc

SEQ ID NO: 11371 - DNA, 18 bp, synthetic construct
  source 1..18: mol_type = other DNA; mol_type = other DNA
ccttctgtgggtttttgt

SEQ ID NO: 11372 - DNA, 18 bp, synthetic construct
  source 1..18: mol_type = other DNA; mol_type = other DNA
ccttctgtgggtttttat

SEQ ID NO: 11373 - DNA, 18 bp, synthetic construct
  source 1..18: mol_type = other DNA; mol_type = other DNA
tccttctgtgggtttttg

SEQ ID NO: 11374 - DNA, 18 bp, synthetic construct
  source 1..18: mol_type = other DNA; mol_type = other DNA
tccttctgtgggttttta

SEQ ID NO: 11375 - DNA, 18 bp, synthetic construct
  source 1..18: mol_type = other DNA; mol_type = other DNA
gtccttctgtgggttttt

SEQ ID NO: 11376 - DNA, 18 bp, synthetic construct
  source 1..18: mol_type = other DNA; mol_type = other DNA
gtccttctgtggattttt

SEQ ID NO: 11377 - DNA, 18 bp, synthetic construct
  source 1..18: mol_type = other DNA; mol_type = other DNA
agtccttctgtgggtttt

SEQ ID NO: 11378 - DNA, 18 bp, synthetic construct
  source 1..18: mol_type = other DNA; mol_type = other DNA
agtccttctgtggatttt

SEQ ID NO: 11379 - DNA, 18 bp, synthetic construct
  source 1..18: mol_type = other DNA; mol_type = other DNA
aagtccttctgtgggttt

SEQ ID NO: 11380 - DNA, 18 bp, synthetic construct
  source 1..18: mol_type = other DNA; mol_type = other DNA
aagtccttctgtggattt

SEQ ID NO: 11381 - DNA, 18 bp, synthetic construct
  source 1..18: mol_type = other DNA; mol_type = other DNA
taagtccttctgtgggtt

SEQ ID NO: 11382 - DNA, 18 bp, synthetic construct
  source 1..18: mol_type = other DNA; mol_type = other DNA
taagtccttctgtggatt

SEQ ID NO: 11383 - DNA, 18 bp, synthetic construct
  source 1..18: mol_type = other DNA; mol_type = other DNA
gtaagtccttctgtgggt

SEQ ID NO: 11384 - DNA, 18 bp, synthetic construct
  source 1..18: mol_type = other DNA; mol_type = other DNA
gtaagtccttctgtggat

SEQ ID NO: 11385 - DNA, 18 bp, synthetic construct
  source 1..18: mol_type = other DNA; mol_type = other DNA
agtaagtccttctgtggg

SEQ ID NO: 11386 - DNA, 18 bp, synthetic construct
  source 1..18: mol_type = other DNA; mol_type = other DNA
agtaagtccttctgtgga

SEQ ID NO: 11387 - DNA, 18 bp, synthetic construct
  source 1..18: mol_type = other DNA; mol_type = other DNA
gagtaagtccttctgtgg

SEQ ID NO: 11388 - DNA, 18 bp, synthetic construct
  source 1..18: mol_type = other DNA; mol_type = other DNA
gagtaagtccttctgtga

SEQ ID NO: 11389 - DNA, 18 bp, synthetic construct
  source 1..18: mol_type = other DNA; mol_type = other DNA
tgagtaagtccttctgtg

SEQ ID NO: 11390 - DNA, 18 bp, synthetic construct
  source 1..18: mol_type = other DNA; mol_type = other DNA
tgagtaagtccttctgta

SEQ ID NO: 11391 - DNA, 18 bp, synthetic construct
  source 1..18: mol_type = other DNA; mol_type = other DNA
ctgagtaagtccttctgt

SEQ ID NO: 11392 - DNA, 18 bp, synthetic construct
  source 1..18: mol_type = other DNA; mol_type = other DNA
ctgagtaagtccttctat

SEQ ID NO: 11393 - DNA, 18 bp, synthetic construct
  source 1..18: mol_type = other DNA; mol_type = other DNA
gctgagtaagtccttctg

SEQ ID NO: 11394 - DNA, 18 bp, synthetic construct
  source 1..18: mol_type = other DNA; mol_type = other DNA
gctgagtaagtccttcta

SEQ ID NO: 11395 - DNA, 18 bp, synthetic construct
  source 1..18: mol_type = other DNA; mol_type = other DNA
cgctgagtaagtccttct

SEQ ID NO: 11396 - DNA, 18 bp, synthetic construct
  source 1..18: mol_type = other DNA; mol_type = other DNA
cgctgagtaaatccttct

SEQ ID NO: 11397 - DNA, 18 bp, synthetic construct
  source 1..18: mol_type = other DNA; mol_type = other DNA
acgctgagtaagtccttc

SEQ ID NO: 11398 - DNA, 18 bp, synthetic construct
  source 1..18: mol_type = other DNA; mol_type = other DNA
acgctgagtaaatccttc

SEQ ID NO: 11399 - DNA, 18 bp, synthetic construct
  source 1..18: mol_type = other DNA; mol_type = other DNA
aacgctgagtaagtcctt

SEQ ID NO: 11400 - DNA, 18 bp, synthetic construct
  source 1..18: mol_type = other DNA; mol_type = other DNA
aacgctgagtaaatcctt

SEQ ID NO: 11401 - DNA, 18 bp, synthetic construct
  source 1..18: mol_type = other DNA; mol_type = other DNA
gaacgctgagtaagtcct

SEQ ID NO: 11402 - DNA, 18 bp, synthetic construct
  source 1..18: mol_type = other DNA; mol_type = other DNA
gaacgctgagtaaatcct

SEQ ID NO: 11403 - DNA, 18 bp, synthetic construct
  source 1..18: mol_type = other DNA; mol_type = other DNA
tgaacgctgagtaagtcc

SEQ ID NO: 11404 - DNA, 18 bp, synthetic construct
  source 1..18: mol_type = other DNA; mol_type = other DNA
tgaacgctgagtaaatcc

SEQ ID NO: 11405 - DNA, 18 bp, synthetic construct
  source 1..18: mol_type = other DNA; mol_type = other DNA
ctgaacgctgagtaagtc

SEQ ID NO: 11406 - DNA, 18 bp, synthetic construct
  source 1..18: mol_type = other DNA; mol_type = other DNA
ctgaacgctgagtaaatc

SEQ ID NO: 11407 - DNA, 18 bp, synthetic construct
  source 1..18: mol_type = other DNA; mol_type = other DNA
tctgaacgctgagtaagt

SEQ ID NO: 11408 - DNA, 18 bp, synthetic construct
  source 1..18: mol_type = other DNA; mol_type = other DNA
tctgaacgctgagtaaat

SEQ ID NO: 11409 - DNA, 18 bp, synthetic construct
  source 1..18: mol_type = other DNA; mol_type = other DNA
gtctgaacgctgagtaag

SEQ ID NO: 11410 - DNA, 18 bp, synthetic construct
  source 1..18: mol_type = other DNA; mol_type = other DNA
gtctgaacgctgagtaaa

SEQ ID NO: 11411 - DNA, 18 bp, synthetic construct
  source 1..18: mol_type = other DNA; mol_type = other DNA
agtctgaacgctgagtaa

SEQ ID NO: 11412 - DNA, 18 bp, synthetic construct
  source 1..18: mol_type = other DNA; mol_type = other DNA
agtctgaacgctgaataa

SEQ ID NO: 11413 - DNA, 18 bp, synthetic construct
  source 1..18: mol_type = other DNA; mol_type = other DNA
gagtctgaacgctgagta

SEQ ID NO: 11414 - DNA, 18 bp, synthetic construct
  source 1..18: mol_type = other DNA; mol_type = other DNA
gagtctgaacgctgaata

SEQ ID NO: 11415 - DNA, 18 bp, synthetic construct
  source 1..18: mol_type = other DNA; mol_type = other DNA
tgagtctgaacgctgagt

SEQ ID NO: 11416 - DNA, 18 bp, synthetic construct
  source 1..18: mol_type = other DNA; mol_type = other DNA
tgagtctgaacgctgaat

SEQ ID NO: 11417 - DNA, 18 bp, synthetic construct
  source 1..18: mol_type = other DNA; mol_type = other DNA
atgagtctgaacgctgag

SEQ ID NO: 11418 - DNA, 18 bp, synthetic construct
  source 1..18: mol_type = other DNA; mol_type = other DNA
atgagtctgaacgctgaa

SEQ ID NO: 11419 - DNA, 18 bp, synthetic construct
  source 1..18: mol_type = other DNA; mol_type = other DNA
gatgagtctgaacgctga

SEQ ID NO: 11420 - DNA, 18 bp, synthetic construct
  source 1..18: mol_type = other DNA; mol_type = other DNA
gatgagtctgaacgctaa

SEQ ID NO: 11421 - DNA, 18 bp, synthetic construct
  source 1..18: mol_type = other DNA; mol_type = other DNA
tgatgagtctgaacgctg

SEQ ID NO: 11422 - DNA, 18 bp, synthetic construct
  source 1..18: mol_type = other DNA; mol_type = other DNA
tgatgagtctgaacgcta

SEQ ID NO: 11423 - DNA, 18 bp, synthetic construct
  source 1..18: mol_type = other DNA; mol_type = other DNA
ctgatgagtctgaacgct

SEQ ID NO: 11424 - DNA, 18 bp, synthetic construct
  source 1..18: mol_type = other DNA; mol_type = other DNA
ctgatgagtctgaacact

SEQ ID NO: 11425 - DNA, 18 bp, synthetic construct
  source 1..18: mol_type = other DNA; mol_type = other DNA
cctgatgagtctgaacgc

SEQ ID NO: 11426 - DNA, 18 bp, synthetic construct
  source 1..18: mol_type = other DNA; mol_type = other DNA
cctgatgagtctgaacac

SEQ ID NO: 11427 - DNA, 18 bp, synthetic construct
  source 1..18: mol_type = other DNA; mol_type = other DNA
acctgatgagtctgaacg

SEQ ID NO: 11428 - DNA, 18 bp, synthetic construct
  source 1..18: mol_type = other DNA; mol_type = other DNA
acctgatgagtctgaaca

SEQ ID NO: 11429 - DNA, 18 bp, synthetic construct
  source 1..18: mol_type = other DNA; mol_type = other DNA
cacctgatgagtctgaac

SEQ ID NO: 11430 - DNA, 18 bp, synthetic construct
  source 1..18: mol_type = other DNA; mol_type = other DNA
cacctgatgagtctaaac

SEQ ID NO: 11431 - DNA, 18 bp, synthetic construct
  source 1..18: mol_type = other DNA; mol_type = other DNA
acacctgatgagtctgaa

SEQ ID NO: 11432 - DNA, 18 bp, synthetic construct
  source 1..18: mol_type = other DNA; mol_type = other DNA
acacctgatgagtctaaa

SEQ ID NO: 11433 - DNA, 18 bp, synthetic construct
  source 1..18: mol_type = other DNA; mol_type = other DNA
gacacctgatgagtctga

SEQ ID NO: 11434 - DNA, 18 bp, synthetic construct
  source 1..18: mol_type = other DNA; mol_type = other DNA
gacacctgatgagtctaa

SEQ ID NO: 11435 - DNA, 18 bp, synthetic construct
  source 1..18: mol_type = other DNA; mol_type = other DNA
cgacacctgatgagtctg

SEQ ID NO: 11436 - DNA, 18 bp, synthetic construct
  source 1..18: mol_type = other DNA; mol_type = other DNA
cgacacctgatgagtcta

SEQ ID NO: 11437 - DNA, 18 bp, synthetic construct
  source 1..18: mol_type = other DNA; mol_type = other DNA
tcgacacctgatgagtct

SEQ ID NO: 11438 - DNA, 18 bp, synthetic construct
  source 1..18: mol_type = other DNA; mol_type = other DNA
tcgacacctgatgaatct

SEQ ID NO: 11439 - DNA, 18 bp, synthetic construct
  source 1..18: mol_type = other DNA; mol_type = other DNA
atcgacacctgatgagtc

SEQ ID NO: 11440 - DNA, 18 bp, synthetic construct
  source 1..18: mol_type = other DNA; mol_type = other DNA
atcgacacctgatgaatc

SEQ ID NO: 11441 - DNA, 18 bp, synthetic construct
  source 1..18: mol_type = other DNA; mol_type = other DNA
gatcgacacctgatgagt

SEQ ID NO: 11442 - DNA, 18 bp, synthetic construct
  source 1..18: mol_type = other DNA; mol_type = other DNA
gatcgacacctgatgaat

SEQ ID NO: 11443 - DNA, 18 bp, synthetic construct
  source 1..18: mol_type = other DNA; mol_type = other DNA
ggatcgacacctgatgag

SEQ ID NO: 11444 - DNA, 18 bp, synthetic construct
  source 1..18: mol_type = other DNA; mol_type = other DNA
ggatcgacacctgatgaa

SEQ ID NO: 11445 - DNA, 18 bp, synthetic construct
  source 1..18: mol_type = other DNA; mol_type = other DNA
gggatcgacacctgatga

SEQ ID NO: 11446 - DNA, 18 bp, synthetic construct
  source 1..18: mol_type = other DNA; mol_type = other DNA
gggatcgacacctgataa

SEQ ID NO: 11447 - DNA, 18 bp, synthetic construct
  source 1..18: mol_type = other DNA; mol_type = other DNA
gtggatcgacacctgatg

SEQ ID NO: 11448 - DNA, 18 bp, synthetic construct
  source 1..18: mol_type = other DNA; mol_type = other DNA
ggtgatcgacacctgatg

SEQ ID NO: 11449 - DNA, 18 bp, synthetic construct
  source 1..18: mol_type = other DNA; mol_type = other DNA
gggtatcgacacctgatg

SEQ ID NO: 11450 - DNA, 18 bp, synthetic construct
  source 1..18: mol_type = other DNA; mol_type = other DNA
gtgggatcgacacctgat

SEQ ID NO: 11451 - DNA, 18 bp, synthetic construct
  source 1..18: mol_type = other DNA; mol_type = other DNA
ggtggatcgacacctgat

SEQ ID NO: 11452 - DNA, 18 bp, synthetic construct
  source 1..18: mol_type = other DNA; mol_type = other DNA
gggtgatcgacacctgat

SEQ ID NO: 11453 - DNA, 18 bp, synthetic construct
  source 1..18: mol_type = other DNA; mol_type = other DNA
tgtgggatcgacacctga

SEQ ID NO: 11454 - DNA, 18 bp, synthetic construct
  source 1..18: mol_type = other DNA; mol_type = other DNA
tggtggatcgacacctga

SEQ ID NO: 11455 - DNA, 18 bp, synthetic construct
  source 1..18: mol_type = other DNA; mol_type = other DNA
tgggtgatcgacacctga

SEQ ID NO: 11456 - DNA, 18 bp, synthetic construct
  source 1..18: mol_type = other DNA; mol_type = other DNA
atgtgggatcgacacctg

SEQ ID NO: 11457 - DNA, 18 bp, synthetic construct
  source 1..18: mol_type = other DNA; mol_type = other DNA
atggtggatcgacacctg

SEQ ID NO: 11458 - DNA, 18 bp, synthetic construct
  source 1..18: mol_type = other DNA; mol_type = other DNA
atgggtgatcgacacctg

SEQ ID NO: 11459 - DNA, 18 bp, synthetic construct
  source 1..18: mol_type = other DNA; mol_type = other DNA
catgtgggatcgacacct

SEQ ID NO: 11460 - DNA, 18 bp, synthetic construct
  source 1..18: mol_type = other DNA; mol_type = other DNA
catggtggatcgacacct

SEQ ID NO: 11461 - DNA, 18 bp, synthetic construct
  source 1..18: mol_type = other DNA; mol_type = other DNA
catgggtgatcgacacct

SEQ ID NO: 11462 - DNA, 18 bp, synthetic construct
  source 1..18: mol_type = other DNA; mol_type = other DNA
ccatgtgggatcgacacc

SEQ ID NO: 11463 - DNA, 18 bp, synthetic construct
  source 1..18: mol_type = other DNA; mol_type = other DNA
ccatggtggatcgacacc

SEQ ID NO: 11464 - DNA, 18 bp, synthetic construct
  source 1..18: mol_type = other DNA; mol_type = other DNA
ccatgggtgatcgacacc

SEQ ID NO: 11465 - DNA, 18 bp, synthetic construct
  source 1..18: mol_type = other DNA; mol_type = other DNA
accatgtgggatcgacac

SEQ ID NO: 11466 - DNA, 18 bp, synthetic construct
  source 1..18: mol_type = other DNA; mol_type = other DNA
accatggtggatcgacac

SEQ ID NO: 11467 - DNA, 18 bp, synthetic construct
  source 1..18: mol_type = other DNA; mol_type = other DNA
accatgggtgatcgacac

SEQ ID NO: 11468 - DNA, 18 bp, synthetic construct
  source 1..18: mol_type = other DNA; mol_type = other DNA
gaccatgtgggatcgaca

SEQ ID NO: 11469 - DNA, 18 bp, synthetic construct
  source 1..18: mol_type = other DNA; mol_type = other DNA
gaccatggtggatcgaca

SEQ ID NO: 11470 - DNA, 18 bp, synthetic construct
  source 1..18: mol_type = other DNA; mol_type = other DNA
gaccatgggtgatcgaca

SEQ ID NO: 11471 - DNA, 18 bp, synthetic construct
  source 1..18: mol_type = other DNA; mol_type = other DNA
cgaccatgtgggatcgac

SEQ ID NO: 11472 - DNA, 18 bp, synthetic construct
  source 1..18: mol_type = other DNA; mol_type = other DNA
cgaccatggtggatcgac

SEQ ID NO: 11473 - DNA, 18 bp, synthetic construct
  source 1..18: mol_type = other DNA; mol_type = other DNA
cgaccatgggtgatcgac

SEQ ID NO: 11474 - DNA, 18 bp, synthetic construct
  source 1..18: mol_type = other DNA; mol_type = other DNA
ccgaccatgtgggatcga

SEQ ID NO: 11475 - DNA, 18 bp, synthetic construct
  source 1..18: mol_type = other DNA; mol_type = other DNA
ccgaccatggtggatcga

SEQ ID NO: 11476 - DNA, 18 bp, synthetic construct
  source 1..18: mol_type = other DNA; mol_type = other DNA
ccgaccatgggtgatcga

SEQ ID NO: 11477 - DNA, 18 bp, synthetic construct
  source 1..18: mol_type = other DNA; mol_type = other DNA
cccgaccatgtgggatcg

SEQ ID NO: 11478 - DNA, 18 bp, synthetic construct
  source 1..18: mol_type = other DNA; mol_type = other DNA
cccgaccatggtggatcg

SEQ ID NO: 11479 - DNA, 18 bp, synthetic construct
  source 1..18: mol_type = other DNA; mol_type = other DNA
cccgaccatgggtgatcg

SEQ ID NO: 11480 - DNA, 18 bp, synthetic construct
  source 1..18: mol_type = other DNA; mol_type = other DNA
gcccgaccatgtgggatc

SEQ ID NO: 11481 - DNA, 18 bp, synthetic construct
  source 1..18: mol_type = other DNA; mol_type = other DNA
gcccgaccatggtggatc

SEQ ID NO: 11482 - DNA, 18 bp, synthetic construct
  source 1..18: mol_type = other DNA; mol_type = other DNA
gcccgaccatgggtgatc

SEQ ID NO: 11483 - DNA, 18 bp, synthetic construct
  source 1..18: mol_type = other DNA; mol_type = other DNA
agcccgaccatgtgggat

SEQ ID NO: 11484 - DNA, 18 bp, synthetic construct
  source 1..18: mol_type = other DNA; mol_type = other DNA
agcccgaccatggtggat

SEQ ID NO: 11485 - DNA, 18 bp, synthetic construct
  source 1..18: mol_type = other DNA; mol_type = other DNA
agcccgaccatgggtgat

SEQ ID NO: 11486 - DNA, 18 bp, synthetic construct
  source 1..18: mol_type = other DNA; mol_type = other DNA
gagcccgaccatgtggga

SEQ ID NO: 11487 - DNA, 18 bp, synthetic construct
  source 1..18: mol_type = other DNA; mol_type = other DNA
gagcccgaccatggtgga

SEQ ID NO: 11488 - DNA, 18 bp, synthetic construct
  source 1..18: mol_type = other DNA; mol_type = other DNA
gagcccgaccatgggtga

SEQ ID NO: 11489 - DNA, 18 bp, synthetic construct
  source 1..18: mol_type = other DNA; mol_type = other DNA
tgagcccgaccatgtggg

SEQ ID NO: 11490 - DNA, 18 bp, synthetic construct
  source 1..18: mol_type = other DNA; mol_type = other DNA
tgagcccgaccatggtgg

SEQ ID NO: 11491 - DNA, 18 bp, synthetic construct
  source 1..18: mol_type = other DNA; mol_type = other DNA
tgagcccgaccatgggtg

SEQ ID NO: 11492 - DNA, 18 bp, synthetic construct
  source 1..18: mol_type = other DNA; mol_type = other DNA
ctgagcccgaccatggga

SEQ ID NO: 11493 - DNA, 18 bp, synthetic construct
  source 1..18: mol_type = other DNA; mol_type = other DNA
ctgagcccgaccattggg

SEQ ID NO: 11494 - DNA, 18 bp, synthetic construct
  source 1..18: mol_type = other DNA; mol_type = other DNA
ctgagcccgaccatgtgg

SEQ ID NO: 11495 - DNA, 18 bp, synthetic construct
  source 1..18: mol_type = other DNA; mol_type = other DNA
ctgagcccgaccatggtg

SEQ ID NO: 11496 - DNA, 18 bp, synthetic construct
  source 1..18: mol_type = other DNA; mol_type = other DNA
cctgagcccgaccatggg

SEQ ID NO: 11497 - DNA, 18 bp, synthetic construct
  source 1..18: mol_type = other DNA; mol_type = other DNA
cctgagcccgaccatgga

SEQ ID NO: 11498 - DNA, 18 bp, synthetic construct
  source 1..18: mol_type = other DNA; mol_type = other DNA
acctgagcccgaccatgg

SEQ ID NO: 11499 - DNA, 18 bp, synthetic construct
  source 1..18: mol_type = other DNA; mol_type = other DNA
acctgagcccgaccatga

SEQ ID NO: 11500 - DNA, 18 bp, synthetic construct
  source 1..18: mol_type = other DNA; mol_type = other DNA
cacctgagcccgaccatg

SEQ ID NO: 11501 - DNA, 18 bp, synthetic construct
  source 1..18: mol_type = other DNA; mol_type = other DNA
cacctgagcccgaccata

SEQ ID NO: 11502 - DNA, 18 bp, synthetic construct
  source 1..18: mol_type = other DNA; mol_type = other DNA
ccacctgagcccgaccat

SEQ ID NO: 11503 - DNA, 18 bp, synthetic construct
  source 1..18: mol_type = other DNA; mol_type = other DNA
ccacctgagcccaaccat

SEQ ID NO: 11504 - DNA, 18 bp, synthetic construct
  source 1..18: mol_type = other DNA; mol_type = other DNA
cccacctgagcccgacca

SEQ ID NO: 11505 - DNA, 18 bp, synthetic construct
  source 1..18: mol_type = other DNA; mol_type = other DNA
cccacctgagcccaacca

SEQ ID NO: 11506 - DNA, 18 bp, synthetic construct
  source 1..18: mol_type = other DNA; mol_type = other DNA
gcccacctgagcccgacc

SEQ ID NO: 11507 - DNA, 18 bp, synthetic construct
  source 1..18: mol_type = other DNA; mol_type = other DNA
gcccacctgagcccaacc

SEQ ID NO: 11508 - DNA, 18 bp, synthetic construct
  source 1..18: mol_type = other DNA; mol_type = other DNA
ggcccacctgagcccgac

SEQ ID NO: 11509 - DNA, 18 bp, synthetic construct
  source 1..18: mol_type = other DNA; mol_type = other DNA
ggcccacctgagcccaac

SEQ ID NO: 11510 - DNA, 18 bp, synthetic construct
  source 1..18: mol_type = other DNA; mol_type = other DNA
gggcccacctgagcccga

SEQ ID NO: 11511 - DNA, 18 bp, synthetic construct
  source 1..18: mol_type = other DNA; mol_type = other DNA
gggcccacctgagcccaa

SEQ ID NO: 11512 - DNA, 18 bp, synthetic construct
  source 1..18: mol_type = other DNA; mol_type = other DNA
tgggcccacctgagcccg

SEQ ID NO: 11513 - DNA, 18 bp, synthetic construct
  source 1..18: mol_type = other DNA; mol_type = other DNA
tgggcccacctgagccca

SEQ ID NO: 11514 - DNA, 18 bp, synthetic construct
  source 1..18: mol_type = other DNA; mol_type = other DNA
ctgggcccacctgagccc

SEQ ID NO: 11515 - DNA, 18 bp, synthetic construct
  source 1..18: mol_type = other DNA; mol_type = other DNA
ctgggcccacctgaaccc

SEQ ID NO: 11516 - DNA, 18 bp, synthetic construct
  source 1..18: mol_type = other DNA; mol_type = other DNA
cctgggcccacctgagcc

SEQ ID NO: 11517 - DNA, 18 bp, synthetic construct
  source 1..18: mol_type = other DNA; mol_type = other DNA
cctgggcccacctgaacc

SEQ ID NO: 11518 - DNA, 18 bp, synthetic construct
  source 1..18: mol_type = other DNA; mol_type = other DNA
acctgggcccacctgagc

SEQ ID NO: 11519 - DNA, 18 bp, synthetic construct
  source 1..18: mol_type = other DNA; mol_type = other DNA
acctgggcccacctgaac

SEQ ID NO: 11520 - DNA, 18 bp, synthetic construct
  source 1..18: mol_type = other DNA; mol_type = other DNA
gacctgggcccacctgag

SEQ ID NO: 11521 - DNA, 18 bp, synthetic construct
  source 1..18: mol_type = other DNA; mol_type = other DNA
gacctgggcccacctgaa

SEQ ID NO: 11522 - DNA, 18 bp, synthetic construct
  source 1..18: mol_type = other DNA; mol_type = other DNA
agacctgggcccacctga

SEQ ID NO: 11523 - DNA, 18 bp, synthetic construct
  source 1..18: mol_type = other DNA; mol_type = other DNA
agacctgggcccacctaa

SEQ ID NO: 11524 - DNA, 18 bp, synthetic construct
  source 1..18: mol_type = other DNA; mol_type = other DNA
gagacctgggcccacctg

SEQ ID NO: 11525 - DNA, 18 bp, synthetic construct
  source 1..18: mol_type = other DNA; mol_type = other DNA
gagacctgggcccaccta

SEQ ID NO: 11526 - DNA, 18 bp, synthetic construct
  source 1..18: mol_type = other DNA; mol_type = other DNA
cgagacctgggcccacct

SEQ ID NO: 11527 - DNA, 18 bp, synthetic construct
  source 1..18: mol_type = other DNA; mol_type = other DNA
cgagacctggacccacct

SEQ ID NO: 11528 - DNA, 18 bp, synthetic construct
  source 1..18: mol_type = other DNA; mol_type = other DNA
acgagacctgggcccacc

SEQ ID NO: 11529 - DNA, 18 bp, synthetic construct
  source 1..18: mol_type = other DNA; mol_type = other DNA
acgagacctggacccacc

SEQ ID NO: 11530 - DNA, 18 bp, synthetic construct
  source 1..18: mol_type = other DNA; mol_type = other DNA
gacgagacctgggcccac

SEQ ID NO: 11531 - DNA, 18 bp, synthetic construct
  source 1..18: mol_type = other DNA; mol_type = other DNA
gacgagacctggacccac

SEQ ID NO: 11532 - DNA, 18 bp, synthetic construct
  source 1..18: mol_type = other DNA; mol_type = other DNA
tgacgagacctgggccca

SEQ ID NO: 11533 - DNA, 18 bp, synthetic construct
  source 1..18: mol_type = other DNA; mol_type = other DNA
tgacgagacctggaccca

SEQ ID NO: 11534 - DNA, 18 bp, synthetic construct
  source 1..18: mol_type = other DNA; mol_type = other DNA
atgacgagacctgggccc

SEQ ID NO: 11535 - DNA, 18 bp, synthetic construct
  source 1..18: mol_type = other DNA; mol_type = other DNA
atgacgagacctggaccc

SEQ ID NO: 11536 - DNA, 18 bp, synthetic construct
  source 1..18: mol_type = other DNA; mol_type = other DNA
aatgacgagacctgggcc

SEQ ID NO: 11537 - DNA, 18 bp, synthetic construct
  source 1..18: mol_type = other DNA; mol_type = other DNA
aatgacgagacctggacc

SEQ ID NO: 11538 - DNA, 18 bp, synthetic construct
  source 1..18: mol_type = other DNA; mol_type = other DNA
caatgacgagacctgggc

SEQ ID NO: 11539 - DNA, 18 bp, synthetic construct
  source 1..18: mol_type = other DNA; mol_type = other DNA
caatgacgagacctggac

SEQ ID NO: 11540 - DNA, 18 bp, synthetic construct
  source 1..18: mol_type = other DNA; mol_type = other DNA
ccaatgacgagacctggg

SEQ ID NO: 11541 - DNA, 18 bp, synthetic construct
  source 1..18: mol_type = other DNA; mol_type = other DNA
ccaatgacgagacctgga

SEQ ID NO: 11542 - DNA, 18 bp, synthetic construct
  source 1..18: mol_type = other DNA; mol_type = other DNA
gccaatgacgagacctgg

SEQ ID NO: 11543 - DNA, 18 bp, synthetic construct
  source 1..18: mol_type = other DNA; mol_type = other DNA
gccaatgacgagacctga

SEQ ID NO: 11544 - DNA, 18 bp, synthetic construct
  source 1..18: mol_type = other DNA; mol_type = other DNA
agccaatgacgagacctg

SEQ ID NO: 11545 - DNA, 18 bp, synthetic construct
  source 1..18: mol_type = other DNA; mol_type = other DNA
agccaatgacgagaccta

SEQ ID NO: 11546 - DNA, 18 bp, synthetic construct
  source 1..18: mol_type = other DNA; mol_type = other DNA
gagccaatgacgagacct

SEQ ID NO: 11547 - DNA, 18 bp, synthetic construct
  source 1..18: mol_type = other DNA; mol_type = other DNA
gagccaatgacgaaacct

SEQ ID NO: 11548 - DNA, 18 bp, synthetic construct
  source 1..18: mol_type = other DNA; mol_type = other DNA
agagccaatgacgagacc

SEQ ID NO: 11549 - DNA, 18 bp, synthetic construct
  source 1..18: mol_type = other DNA; mol_type = other DNA
agagccaatgacgaaacc

SEQ ID NO: 11550 - DNA, 18 bp, synthetic construct
  source 1..18: mol_type = other DNA; mol_type = other DNA
cagagccaatgacgagac

SEQ ID NO: 11551 - DNA, 18 bp, synthetic construct
  source 1..18: mol_type = other DNA; mol_type = other DNA
cagagccaatgacgaaac

SEQ ID NO: 11552 - DNA, 18 bp, synthetic construct
  source 1..18: mol_type = other DNA; mol_type = other DNA
acagagccaatgacgaga

SEQ ID NO: 11553 - DNA, 18 bp, synthetic construct
  source 1..18: mol_type = other DNA; mol_type = other DNA
acagagccaatgacgaaa

SEQ ID NO: 11554 - DNA, 18 bp, synthetic construct
  source 1..18: mol_type = other DNA; mol_type = other DNA
gacagagccaatgacgag

SEQ ID NO: 11555 - DNA, 18 bp, synthetic construct
  source 1..18: mol_type = other DNA; mol_type = other DNA
gacagagccaatgacgaa

SEQ ID NO: 11556 - DNA, 18 bp, synthetic construct
  source 1..18: mol_type = other DNA; mol_type = other DNA
ggacagagccaatgacga

SEQ ID NO: 11557 - DNA, 18 bp, synthetic construct
  source 1..18: mol_type = other DNA; mol_type = other DNA
ggacagagccaatgacaa

SEQ ID NO: 11558 - DNA, 18 bp, synthetic construct
  source 1..18: mol_type = other DNA; mol_type = other DNA
aggacagagccaatgacg

SEQ ID NO: 11559 - DNA, 18 bp, synthetic construct
  source 1..18: mol_type = other DNA; mol_type = other DNA
aggacagagccaatgaca

SEQ ID NO: 11560 - DNA, 18 bp, synthetic construct
  source 1..18: mol_type = other DNA; mol_type = other DNA
gaggacagagccaatgac

SEQ ID NO: 11561 - DNA, 18 bp, synthetic construct
  source 1..18: mol_type = other DNA; mol_type = other DNA
gaggacagagccaataac

SEQ ID NO: 11562 - DNA, 18 bp, synthetic construct
  source 1..18: mol_type = other DNA; mol_type = other DNA
agaggacagagccaatga

SEQ ID NO: 11563 - DNA, 18 bp, synthetic construct
  source 1..18: mol_type = other DNA; mol_type = other DNA
agaggacagagccaataa

SEQ ID NO: 11564 - DNA, 18 bp, synthetic construct
  source 1..18: mol_type = other DNA; mol_type = other DNA
gagaggacagagccaatg

SEQ ID NO: 11565 - DNA, 18 bp, synthetic construct
  source 1..18: mol_type = other DNA; mol_type = other DNA
gagaggacagagccaata

SEQ ID NO: 11566 - DNA, 18 bp, synthetic construct
  source 1..18: mol_type = other DNA; mol_type = other DNA
ggagaggacagagccaat

SEQ ID NO: 11567 - DNA, 18 bp, synthetic construct
  source 1..18: mol_type = other DNA; mol_type = other DNA
ggagaggacagaaccaat

SEQ ID NO: 11568 - DNA, 18 bp, synthetic construct
  source 1..18: mol_type = other DNA; mol_type = other DNA
aggagaggacagagccaa

SEQ ID NO: 11569 - DNA, 18 bp, synthetic construct
  source 1..18: mol_type = other DNA; mol_type = other DNA
aggagaggacagaaccaa

SEQ ID NO: 11570 - DNA, 18 bp, synthetic construct
  source 1..18: mol_type = other DNA; mol_type = other DNA
caggagaggacagagcca

SEQ ID NO: 11571 - DNA, 18 bp, synthetic construct
  source 1..18: mol_type = other DNA; mol_type = other DNA
caggagaggacagaacca

SEQ ID NO: 11572 - DNA, 18 bp, synthetic construct
  source 1..18: mol_type = other DNA; mol_type = other DNA
acaggagaggacagagcc

SEQ ID NO: 11573 - DNA, 18 bp, synthetic construct
  source 1..18: mol_type = other DNA; mol_type = other DNA
acaggagaggacagaacc

SEQ ID NO: 11574 - DNA, 18 bp, synthetic construct
  source 1..18: mol_type = other DNA; mol_type = other DNA
cacaggagaggacagagc

SEQ ID NO: 11575 - DNA, 18 bp, synthetic construct
  source 1..18: mol_type = other DNA; mol_type = other DNA
cacaggagaggacagaac

SEQ ID NO: 11576 - DNA, 18 bp, synthetic construct
  source 1..18: mol_type = other DNA; mol_type = other DNA
tcacaggagaggacagag

SEQ ID NO: 11577 - DNA, 18 bp, synthetic construct
  source 1..18: mol_type = other DNA; mol_type = other DNA
tcacaggagaggacagaa

SEQ ID NO: 11578 - DNA, 18 bp, synthetic construct
  source 1..18: mol_type = other DNA; mol_type = other DNA
ctcacaggagaggacaga

SEQ ID NO: 11579 - DNA, 18 bp, synthetic construct
  source 1..18: mol_type = other DNA; mol_type = other DNA
ctcacaggagaggacaaa

SEQ ID NO: 11580 - DNA, 18 bp, synthetic construct
  source 1..18: mol_type = other DNA; mol_type = other DNA
cctcacaggagaggacag

SEQ ID NO: 11581 - DNA, 18 bp, synthetic construct
  source 1..18: mol_type = other DNA; mol_type = other DNA
cctcacaggagaggacaa

SEQ ID NO: 11582 - DNA, 18 bp, synthetic construct
  source 1..18: mol_type = other DNA; mol_type = other DNA
gcctcacaggagaggaca

SEQ ID NO: 11583 - DNA, 18 bp, synthetic construct
  source 1..18: mol_type = other DNA; mol_type = other DNA
gcctcacaggagagaaca

SEQ ID NO: 11584 - DNA, 18 bp, synthetic construct
  source 1..18: mol_type = other DNA; mol_type = other DNA
tgcctcacaggagaggac

SEQ ID NO: 11585 - DNA, 18 bp, synthetic construct
  source 1..18: mol_type = other DNA; mol_type = other DNA
tgcctcacaggagagaac

SEQ ID NO: 11586 - DNA, 18 bp, synthetic construct
  source 1..18: mol_type = other DNA; mol_type = other DNA
ctgcctcacaggagagga

SEQ ID NO: 11587 - DNA, 18 bp, synthetic construct
  source 1..18: mol_type = other DNA; mol_type = other DNA
ctgcctcacaggagagaa

SEQ ID NO: 11588 - DNA, 18 bp, synthetic construct
  source 1..18: mol_type = other DNA; mol_type = other DNA
gctgcctcacaggagagg

SEQ ID NO: 11589 - DNA, 18 bp, synthetic construct
  source 1..18: mol_type = other DNA; mol_type = other DNA
gctgcctcacaggagaga

SEQ ID NO: 11590 - DNA, 18 bp, synthetic construct
  source 1..18: mol_type = other DNA; mol_type = other DNA
agctgcctcacaggagag

SEQ ID NO: 11591 - DNA, 18 bp, synthetic construct
  source 1..18: mol_type = other DNA; mol_type = other DNA
agctgcctcacaggagaa

SEQ ID NO: 11592 - DNA, 18 bp, synthetic construct
  source 1..18: mol_type = other DNA; mol_type = other DNA
cagctgcctcacaggaga

SEQ ID NO: 11593 - DNA, 18 bp, synthetic construct
  source 1..18: mol_type = other DNA; mol_type = other DNA
cagctgcctcacaggaaa

SEQ ID NO: 11594 - DNA, 18 bp, synthetic construct
  source 1..18: mol_type = other DNA; mol_type = other DNA
gcagctgcctcacaggag

SEQ ID NO: 11595 - DNA, 18 bp, synthetic construct
  source 1..18: mol_type = other DNA; mol_type = other DNA
gcagctgcctcacaggaa

SEQ ID NO: 11596 - DNA, 18 bp, synthetic construct
  source 1..18: mol_type = other DNA; mol_type = other DNA
tgcagctgcctcacagga

SEQ ID NO: 11597 - DNA, 18 bp, synthetic construct
  source 1..18: mol_type = other DNA; mol_type = other DNA
tgcagctgcctcacagaa

SEQ ID NO: 11598 - DNA, 18 bp, synthetic construct
  source 1..18: mol_type = other DNA; mol_type = other DNA
ctgcagctgcctcacagg

SEQ ID NO: 11599 - DNA, 18 bp, synthetic construct
  source 1..18: mol_type = other DNA; mol_type = other DNA
ctgcagctgcctcacaga

SEQ ID NO: 11600 - DNA, 18 bp, synthetic construct
  source 1..18: mol_type = other DNA; mol_type = other DNA
gctgcagctgcctcacag

SEQ ID NO: 11601 - DNA, 18 bp, synthetic construct
  source 1..18: mol_type = other DNA; mol_type = other DNA
gctgcagctgcctcacaa

SEQ ID NO: 11602 - DNA, 18 bp, synthetic construct
  source 1..18: mol_type = other DNA; mol_type = other DNA
tgctgcagctgcctcaca

SEQ ID NO: 11603 - DNA, 18 bp, synthetic construct
  source 1..18: mol_type = other DNA; mol_type = other DNA
tgctgcagctacctcaca

SEQ ID NO: 11604 - DNA, 18 bp, synthetic construct
  source 1..18: mol_type = other DNA; mol_type = other DNA
ctgctgcagctgcctcac

SEQ ID NO: 11605 - DNA, 18 bp, synthetic construct
  source 1..18: mol_type = other DNA; mol_type = other DNA
ctgctgcagctacctcac

SEQ ID NO: 11606 - DNA, 18 bp, synthetic construct
  source 1..18: mol_type = other DNA; mol_type = other DNA
actgctgcagctgcctca

SEQ ID NO: 11607 - DNA, 18 bp, synthetic construct
  source 1..18: mol_type = other DNA; mol_type = other DNA
actgctgcagctacctca

SEQ ID NO: 11608 - DNA, 18 bp, synthetic construct
  source 1..18: mol_type = other DNA; mol_type = other DNA
aactgctgcagctgcctc

SEQ ID NO: 11609 - DNA, 18 bp, synthetic construct
  source 1..18: mol_type = other DNA; mol_type = other DNA
aactgctgcagctacctc

SEQ ID NO: 11610 - DNA, 18 bp, synthetic construct
  source 1..18: mol_type = other DNA; mol_type = other DNA
caactgctgcagctgcct

SEQ ID NO: 11611 - DNA, 18 bp, synthetic construct
  source 1..18: mol_type = other DNA; mol_type = other DNA
caactgctgcagctacct

SEQ ID NO: 11612 - DNA, 18 bp, synthetic construct
  source 1..18: mol_type = other DNA; mol_type = other DNA
gcaactgctgcagctgcc

SEQ ID NO: 11613 - DNA, 18 bp, synthetic construct
  source 1..18: mol_type = other DNA; mol_type = other DNA
gcaactgctgcagctacc

SEQ ID NO: 11614 - DNA, 18 bp, synthetic construct
  source 1..18: mol_type = other DNA; mol_type = other DNA
tgcaactgctgcagctgc

SEQ ID NO: 11615 - DNA, 18 bp, synthetic construct
  source 1..18: mol_type = other DNA; mol_type = other DNA
tgcaactgctgcagctac

SEQ ID NO: 11616 - DNA, 18 bp, synthetic construct
  source 1..18: mol_type = other DNA; mol_type = other DNA
ctgcaactgctgcagctg

SEQ ID NO: 11617 - DNA, 18 bp, synthetic construct
  source 1..18: mol_type = other DNA; mol_type = other DNA
ctgcaactgctgcagcta

SEQ ID NO: 11618 - DNA, 18 bp, synthetic construct
  source 1..18: mol_type = other DNA; mol_type = other DNA
cctgcaactgctgcagct

SEQ ID NO: 11619 - DNA, 18 bp, synthetic construct
  source 1..18: mol_type = other DNA; mol_type = other DNA
cctgcaactgctgcaact

SEQ ID NO: 11620 - DNA, 18 bp, synthetic construct
  source 1..18: mol_type = other DNA; mol_type = other DNA
ccctgcaactgctgcagc

SEQ ID NO: 11621 - DNA, 18 bp, synthetic construct
  source 1..18: mol_type = other DNA; mol_type = other DNA
ccctgcaactgctgcaac

SEQ ID NO: 11622 - DNA, 18 bp, synthetic construct
  source 1..18: mol_type = other DNA; mol_type = other DNA
gccctgcaactgctgcag

SEQ ID NO: 11623 - DNA, 18 bp, synthetic construct
  source 1..18: mol_type = other DNA; mol_type = other DNA
gccctgcaactgctgcaa

SEQ ID NO: 11624 - DNA, 18 bp, synthetic construct
  source 1..18: mol_type = other DNA; mol_type = other DNA
tgccctgcaactgctgca

SEQ ID NO: 11625 - DNA, 18 bp, synthetic construct
  source 1..18: mol_type = other DNA; mol_type = other DNA
tgccctgcaactgctaca

SEQ ID NO: 11626 - DNA, 18 bp, synthetic construct
  source 1..18: mol_type = other DNA; mol_type = other DNA
ctgccctgcaactgctgc

SEQ ID NO: 11627 - DNA, 18 bp, synthetic construct
  source 1..18: mol_type = other DNA; mol_type = other DNA
ctgccctgcaactgctac

SEQ ID NO: 11628 - DNA, 18 bp, synthetic construct
  source 1..18: mol_type = other DNA; mol_type = other DNA
cctgccctgcaactgctg

SEQ ID NO: 11629 - DNA, 18 bp, synthetic construct
  source 1..18: mol_type = other DNA; mol_type = other DNA
cctgccctgcaactgcta

SEQ ID NO: 11630 - DNA, 18 bp, synthetic construct
  source 1..18: mol_type = other DNA; mol_type = other DNA
ccctgccctgcaactgct

SEQ ID NO: 11631 - DNA, 18 bp, synthetic construct
  source 1..18: mol_type = other DNA; mol_type = other DNA
ccctgccctgcaactact

SEQ ID NO: 11632 - DNA, 18 bp, synthetic construct
  source 1..18: mol_type = other DNA; mol_type = other DNA
accctgccctgcaactgc

SEQ ID NO: 11633 - DNA, 18 bp, synthetic construct
  source 1..18: mol_type = other DNA; mol_type = other DNA
accctgccctgcaactac

SEQ ID NO: 11634 - DNA, 18 bp, synthetic construct
  source 1..18: mol_type = other DNA; mol_type = other DNA
gaccctgccctgcaactg

SEQ ID NO: 11635 - DNA, 18 bp, synthetic construct
  source 1..18: mol_type = other DNA; mol_type = other DNA
gaccctgccctgcaacta

SEQ ID NO: 11636 - DNA, 18 bp, synthetic construct
  source 1..18: mol_type = other DNA; mol_type = other DNA
tgaccctgccctgcaact

SEQ ID NO: 11637 - DNA, 18 bp, synthetic construct
  source 1..18: mol_type = other DNA; mol_type = other DNA
tgaccctgccctacaact

SEQ ID NO: 11638 - DNA, 18 bp, synthetic construct
  source 1..18: mol_type = other DNA; mol_type = other DNA
ctgaccctgccctgcaac

SEQ ID NO: 11639 - DNA, 18 bp, synthetic construct
  source 1..18: mol_type = other DNA; mol_type = other DNA
ctgaccctgccctacaac

SEQ ID NO: 11640 - DNA, 18 bp, synthetic construct
  source 1..18: mol_type = other DNA; mol_type = other DNA
cctgaccctgccctgcaa

SEQ ID NO: 11641 - DNA, 18 bp, synthetic construct
  source 1..18: mol_type = other DNA; mol_type = other DNA
cctgaccctgccctacaa

SEQ ID NO: 11642 - DNA, 18 bp, synthetic construct
  source 1..18: mol_type = other DNA; mol_type = other DNA
ccctgaccctgccctgca

SEQ ID NO: 11643 - DNA, 18 bp, synthetic construct
  source 1..18: mol_type = other DNA; mol_type = other DNA
ccctgaccctgccctaca

SEQ ID NO: 11644 - DNA, 18 bp, synthetic construct
  source 1..18: mol_type = other DNA; mol_type = other DNA
cccctgaccctgccctgc

SEQ ID NO: 11645 - DNA, 18 bp, synthetic construct
  source 1..18: mol_type = other DNA; mol_type = other DNA
cccctgaccctgccctac

SEQ ID NO: 11646 - DNA, 18 bp, synthetic construct
  source 1..18: mol_type = other DNA; mol_type = other DNA
tcccctgaccctgccctg

SEQ ID NO: 11647 - DNA, 18 bp, synthetic construct
  source 1..18: mol_type = other DNA; mol_type = other DNA
tcccctgaccctgcccta

SEQ ID NO: 11648 - DNA, 18 bp, synthetic construct
  source 1..18: mol_type = other DNA; mol_type = other DNA
atcccctgaccctgccct

SEQ ID NO: 11649 - DNA, 18 bp, synthetic construct
  source 1..18: mol_type = other DNA; mol_type = other DNA
atcccctgaccctaccct

SEQ ID NO: 11650 - DNA, 18 bp, synthetic construct
  source 1..18: mol_type = other DNA; mol_type = other DNA
aatcccctgaccctgccc

SEQ ID NO: 11651 - DNA, 18 bp, synthetic construct
  source 1..18: mol_type = other DNA; mol_type = other DNA
aatcccctgaccctaccc

SEQ ID NO: 11652 - DNA, 18 bp, synthetic construct
  source 1..18: mol_type = other DNA; mol_type = other DNA
gaatcccctgaccctgcc

SEQ ID NO: 11653 - DNA, 18 bp, synthetic construct
  source 1..18: mol_type = other DNA; mol_type = other DNA
gaatcccctgaccctacc

SEQ ID NO: 11654 - DNA, 18 bp, synthetic construct
  source 1..18: mol_type = other DNA; mol_type = other DNA
ggaatcccctgaccctgc

SEQ ID NO: 11655 - DNA, 18 bp, synthetic construct
  source 1..18: mol_type = other DNA; mol_type = other DNA
ggaatcccctgaccctac

SEQ ID NO: 11656 - DNA, 18 bp, synthetic construct
  source 1..18: mol_type = other DNA; mol_type = other DNA
aggaatcccctgaccctg

SEQ ID NO: 11657 - DNA, 18 bp, synthetic construct
  source 1..18: mol_type = other DNA; mol_type = other DNA
aggaatcccctgacccta

SEQ ID NO: 11658 - DNA, 18 bp, synthetic construct
  source 1..18: mol_type = other DNA; mol_type = other DNA
gaggaatcccctgaccct

SEQ ID NO: 11659 - DNA, 18 bp, synthetic construct
  source 1..18: mol_type = other DNA; mol_type = other DNA
gaggaatcccctaaccct

SEQ ID NO: 11660 - DNA, 18 bp, synthetic construct
  source 1..18: mol_type = other DNA; mol_type = other DNA
tgaggaatcccctgaccc

SEQ ID NO: 11661 - DNA, 18 bp, synthetic construct
  source 1..18: mol_type = other DNA; mol_type = other DNA
tgaggaatcccctaaccc

SEQ ID NO: 11662 - DNA, 18 bp, synthetic construct
  source 1..18: mol_type = other DNA; mol_type = other DNA
ctgaggaatcccctgacc

SEQ ID NO: 11663 - DNA, 18 bp, synthetic construct
  source 1..18: mol_type = other DNA; mol_type = other DNA
ctgaggaatcccctaacc

SEQ ID NO: 11664 - DNA, 18 bp, synthetic construct
  source 1..18: mol_type = other DNA; mol_type = other DNA
gctgaggaatcccctgac

SEQ ID NO: 11665 - DNA, 18 bp, synthetic construct
  source 1..18: mol_type = other DNA; mol_type = other DNA
gctgaggaatcccctaac

SEQ ID NO: 11666 - DNA, 18 bp, synthetic construct
  source 1..18: mol_type = other DNA; mol_type = other DNA
ggctgaggaatcccctga

SEQ ID NO: 11667 - DNA, 18 bp, synthetic construct
  source 1..18: mol_type = other DNA; mol_type = other DNA
ggctgaggaatcccctaa

SEQ ID NO: 11668 - DNA, 18 bp, synthetic construct
  source 1..18: mol_type = other DNA; mol_type = other DNA
cggctgaggaatcccctg

SEQ ID NO: 11669 - DNA, 18 bp, synthetic construct
  source 1..18: mol_type = other DNA; mol_type = other DNA
cggctgaggaatccccta

SEQ ID NO: 11670 - DNA, 18 bp, synthetic construct
  source 1..18: mol_type = other DNA; mol_type = other DNA
ccggctgaggaatcccct

SEQ ID NO: 11671 - DNA, 18 bp, synthetic construct
  source 1..18: mol_type = other DNA; mol_type = other DNA
ccggctgagaaatcccct

SEQ ID NO: 11672 - DNA, 18 bp, synthetic construct
  source 1..18: mol_type = other DNA; mol_type = other DNA
tccggctgaggaatcccc

SEQ ID NO: 11673 - DNA, 18 bp, synthetic construct
  source 1..18: mol_type = other DNA; mol_type = other DNA
tccggctgagaaatcccc

SEQ ID NO: 11674 - DNA, 18 bp, synthetic construct
  source 1..18: mol_type = other DNA; mol_type = other DNA
ttccggctgaggaatccc

SEQ ID NO: 11675 - DNA, 18 bp, synthetic construct
  source 1..18: mol_type = other DNA; mol_type = other DNA
ttccggctgagaaatccc

SEQ ID NO: 11676 - DNA, 18 bp, synthetic construct
  source 1..18: mol_type = other DNA; mol_type = other DNA
gttccggctgaggaatcc

SEQ ID NO: 11677 - DNA, 18 bp, synthetic construct
  source 1..18: mol_type = other DNA; mol_type = other DNA
gttccggctgagaaatcc

SEQ ID NO: 11678 - DNA, 18 bp, synthetic construct
  source 1..18: mol_type = other DNA; mol_type = other DNA
ggttccggctgaggaatc

SEQ ID NO: 11679 - DNA, 18 bp, synthetic construct
  source 1..18: mol_type = other DNA; mol_type = other DNA
ggttccggctgagaaatc

SEQ ID NO: 11680 - DNA, 18 bp, synthetic construct
  source 1..18: mol_type = other DNA; mol_type = other DNA
aggttccggctgaggaat

SEQ ID NO: 11681 - DNA, 18 bp, synthetic construct
  source 1..18: mol_type = other DNA; mol_type = other DNA
aggttccggctgagaaat

SEQ ID NO: 11682 - DNA, 18 bp, synthetic construct
  source 1..18: mol_type = other DNA; mol_type = other DNA
gaggttccggctgaggaa

SEQ ID NO: 11683 - DNA, 18 bp, synthetic construct
  source 1..18: mol_type = other DNA; mol_type = other DNA
gaggttccggctgagaaa

SEQ ID NO: 11684 - DNA, 18 bp, synthetic construct
  source 1..18: mol_type = other DNA; mol_type = other DNA
agaggttccggctgagga

SEQ ID NO: 11685 - DNA, 18 bp, synthetic construct
  source 1..18: mol_type = other DNA; mol_type = other DNA
agaggttccggctgagaa

SEQ ID NO: 11686 - DNA, 18 bp, synthetic construct
  source 1..18: mol_type = other DNA; mol_type = other DNA
cagaggttccggctgagg

SEQ ID NO: 11687 - DNA, 18 bp, synthetic construct
  source 1..18: mol_type = other DNA; mol_type = other DNA
cagaggttccggctgaga

SEQ ID NO: 11688 - DNA, 18 bp, synthetic construct
  source 1..18: mol_type = other DNA; mol_type = other DNA
ccagaggttccggctgag

SEQ ID NO: 11689 - DNA, 18 bp, synthetic construct
  source 1..18: mol_type = other DNA; mol_type = other DNA
ccagaggttccggctgaa

SEQ ID NO: 11690 - DNA, 18 bp, synthetic construct
  source 1..18: mol_type = other DNA; mol_type = other DNA
gccagaggttccggctga

SEQ ID NO: 11691 - DNA, 18 bp, synthetic construct
  source 1..18: mol_type = other DNA; mol_type = other DNA
gccagaggttccggctaa

SEQ ID NO: 11692 - DNA, 18 bp, synthetic construct
  source 1..18: mol_type = other DNA; mol_type = other DNA
tgccagaggttccggctg

SEQ ID NO: 11693 - DNA, 18 bp, synthetic construct
  source 1..18: mol_type = other DNA; mol_type = other DNA
tgccagaggttccggcta

SEQ ID NO: 11694 - DNA, 18 bp, synthetic construct
  source 1..18: mol_type = other DNA; mol_type = other DNA
gtgccagaggttccggct

SEQ ID NO: 11695 - DNA, 20 bp, synthetic construct
  source 1..20: mol_type = other DNA; mol_type = other DNA
cacaccagcactcccccaga

SEQ ID NO: 11696 - DNA, 20 bp, synthetic construct
  source 1..20: mol_type = other DNA; mol_type = other DNA
aaagccaaggccctgtggac

SEQ ID NO: 11697 - DNA, 20 bp, synthetic construct
  source 1..20: mol_type = other DNA; mol_type = other DNA
tccacatgataggctctcac

SEQ ID NO: 11698 - DNA, 20 bp, synthetic construct
  source 1..20: mol_type = other DNA; mol_type = other DNA
cgaccatgggggatcgacac

SEQ ID NO: 11699 - DNA, 20 bp, synthetic construct
  source 1..20: mol_type = other DNA; mol_type = other DNA
gatcgacacctgatgagtct

SEQ ID NO: 11700 - DNA, 20 bp, synthetic construct
  source 1..20: mol_type = other DNA; mol_type = other DNA
ggatcgacacctgatgagtc

SEQ ID NO: 11701 - DNA, 25 bp, synthetic construct
  source 1..25: mol_type = other DNA; mol_type = other DNA
cacccgtgatgctgacagaggccac

SEQ ID NO: 11702 - DNA, 25 bp, synthetic construct
  source 1..25: mol_type = other DNA; mol_type = other DNA
cacccgtgatgctgacagagaccac

SEQ ID NO: 11703 - DNA, 25 bp, synthetic construct
  source 1..25: mol_type = other DNA; mol_type = other DNA
cacccgtgatgctgacagaaaccac

SEQ ID NO: 11704 - DNA, 25 bp, synthetic construct
  source 1..25: mol_type = other DNA; mol_type = other DNA
ccacccgtgatgctgacagaggcca

SEQ ID NO: 11705 - DNA, 25 bp, synthetic construct
  source 1..25: mol_type = other DNA; mol_type = other DNA
ccacccgtgatgctgacagagacca

SEQ ID NO: 11706 - DNA, 25 bp, synthetic construct
  source 1..25: mol_type = other DNA; mol_type = other DNA
ccacccgtgatgctgacagaaacca

SEQ ID NO: 11707 - DNA, 25 bp, synthetic construct
  source 1..25: mol_type = other DNA; mol_type = other DNA
gccacccgtgatgctgacagagacc

SEQ ID NO: 11708 - DNA, 25 bp, synthetic construct
  source 1..25: mol_type = other DNA; mol_type = other DNA
gccacccgtgatgctgacagaaacc

SEQ ID NO: 11709 - DNA, 25 bp, synthetic construct
  source 1..25: mol_type = other DNA; mol_type = other DNA
ggccacccgtgatgctgacagaggc

SEQ ID NO: 11710 - DNA, 25 bp, synthetic construct
  source 1..25: mol_type = other DNA; mol_type = other DNA
ggccacccgtgatgctgacagagac

SEQ ID NO: 11711 - DNA, 25 bp, synthetic construct
  source 1..25: mol_type = other DNA; mol_type = other DNA
ggccacccgtgatgctgacagaaac

SEQ ID NO: 11712 - DNA, 25 bp, synthetic construct
  source 1..25: mol_type = other DNA; mol_type = other DNA
cggccacccgtgatgctgacagagg

SEQ ID NO: 11713 - DNA, 25 bp, synthetic construct
  source 1..25: mol_type = other DNA; mol_type = other DNA
cggccacccgtgatgctgacagaga

SEQ ID NO: 11714 - DNA, 25 bp, synthetic construct
  source 1..25: mol_type = other DNA; mol_type = other DNA
cggccacccgtgatgctgacagaaa

SEQ ID NO: 11715 - DNA, 25 bp, synthetic construct
  source 1..25: mol_type = other DNA; mol_type = other DNA
ccggccacccgtgatgctgacagaa

SEQ ID NO: 11716 - DNA, 25 bp, synthetic construct
  source 1..25: mol_type = other DNA; mol_type = other DNA
ccggccacccgtgatgctgacaaaa

SEQ ID NO: 11717 - DNA, 25 bp, synthetic construct
  source 1..25: mol_type = other DNA; mol_type = other DNA
cccggccacccgtgatgctgacaga

SEQ ID NO: 11718 - DNA, 25 bp, synthetic construct
  source 1..25: mol_type = other DNA; mol_type = other DNA
cccggccacccgtgatgctgacaaa

SEQ ID NO: 11719 - DNA, 25 bp, synthetic construct
  source 1..25: mol_type = other DNA; mol_type = other DNA
cccggccacccgtgatgctaacaaa

SEQ ID NO: 11720 - DNA, 25 bp, synthetic construct
  source 1..25: mol_type = other DNA; mol_type = other DNA
acccggccacccgtgatgctgacag

SEQ ID NO: 11721 - DNA, 25 bp, synthetic construct
  source 1..25: mol_type = other DNA; mol_type = other DNA
acccggccacccgtgatgctgacaa

SEQ ID NO: 11722 - DNA, 25 bp, synthetic construct
  source 1..25: mol_type = other DNA; mol_type = other DNA
acccggccacccgtgatgctaacaa

SEQ ID NO: 11723 - DNA, 25 bp, synthetic construct
  source 1..25: mol_type = other DNA; mol_type = other DNA
aacccggccacccgtgatgctaaca

SEQ ID NO: 11724 - DNA, 25 bp, synthetic construct
  source 1..25: mol_type = other DNA; mol_type = other DNA
aacccggccacccgtgatactaaca

SEQ ID NO: 11725 - DNA, 25 bp, synthetic construct
  source 1..25: mol_type = other DNA; mol_type = other DNA
caacccggccacccgtgatgctgac

SEQ ID NO: 11726 - DNA, 25 bp, synthetic construct
  source 1..25: mol_type = other DNA; mol_type = other DNA
caacccggccacccgtgatgctaac

SEQ ID NO: 11727 - DNA, 25 bp, synthetic construct
  source 1..25: mol_type = other DNA; mol_type = other DNA
caacccggccacccgtgatactaac

SEQ ID NO: 11728 - DNA, 25 bp, synthetic construct
  source 1..25: mol_type = other DNA; mol_type = other DNA
ccaacccggccacccgtgatgctga

SEQ ID NO: 11729 - DNA, 25 bp, synthetic construct
  source 1..25: mol_type = other DNA; mol_type = other DNA
ccaacccggccacccgtgatgctaa

SEQ ID NO: 11730 - DNA, 25 bp, synthetic construct
  source 1..25: mol_type = other DNA; mol_type = other DNA
ccaacccggccacccgtgatactaa

SEQ ID NO: 11731 - DNA, 25 bp, synthetic construct
  source 1..25: mol_type = other DNA; mol_type = other DNA
cccaacccggccacccgtgatgcta

SEQ ID NO: 11732 - DNA, 25 bp, synthetic construct
  source 1..25: mol_type = other DNA; mol_type = other DNA
cccaacccggccacccgtgatacta

SEQ ID NO: 11733 - DNA, 25 bp, synthetic construct
  source 1..25: mol_type = other DNA; mol_type = other DNA
ccccaacccggccacccgtgatgct

SEQ ID NO: 11734 - DNA, 25 bp, synthetic construct
  source 1..25: mol_type = other DNA; mol_type = other DNA
ccccaacccggccacccgtgatact

SEQ ID NO: 11735 - DNA, 25 bp, synthetic construct
  source 1..25: mol_type = other DNA; mol_type = other DNA
ccccaacccggccacccgtaatact

SEQ ID NO: 11736 - DNA, 25 bp, synthetic construct
  source 1..25: mol_type = other DNA; mol_type = other DNA
tccccaacccggccacccgtgatgc

SEQ ID NO: 11737 - DNA, 25 bp, synthetic construct
  source 1..25: mol_type = other DNA; mol_type = other DNA
tccccaacccggccacccgtgatac

SEQ ID NO: 11738 - DNA, 25 bp, synthetic construct
  source 1..25: mol_type = other DNA; mol_type = other DNA
tccccaacccggccacccgtaatac

SEQ ID NO: 11739 - DNA, 25 bp, synthetic construct
  source 1..25: mol_type = other DNA; mol_type = other DNA
ctccccaacccggccacccgtgata

SEQ ID NO: 11740 - DNA, 25 bp, synthetic construct
  source 1..25: mol_type = other DNA; mol_type = other DNA
ctccccaacccggccacccgtaata

SEQ ID NO: 11741 - DNA, 25 bp, synthetic construct
  source 1..25: mol_type = other DNA; mol_type = other DNA
cctccccaacccggccacccgtgat

SEQ ID NO: 11742 - DNA, 25 bp, synthetic construct
  source 1..25: mol_type = other DNA; mol_type = other DNA
cctccccaacccggccacccgtaat

SEQ ID NO: 11743 - DNA, 25 bp, synthetic construct
  source 1..25: mol_type = other DNA; mol_type = other DNA
cctccccaacccggccacccataat

SEQ ID NO: 11744 - DNA, 25 bp, synthetic construct
  source 1..25: mol_type = other DNA; mol_type = other DNA
tcctccccaacccggccacccgtga

SEQ ID NO: 11745 - DNA, 25 bp, synthetic construct
  source 1..25: mol_type = other DNA; mol_type = other DNA
tcctccccaacccggccacccgtaa

SEQ ID NO: 11746 - DNA, 25 bp, synthetic construct
  source 1..25: mol_type = other DNA; mol_type = other DNA
tcctccccaacccggccacccataa

SEQ ID NO: 11747 - DNA, 25 bp, synthetic construct
  source 1..25: mol_type = other DNA; mol_type = other DNA
gtcctccccaacccggccacccgta

SEQ ID NO: 11748 - DNA, 25 bp, synthetic construct
  source 1..25: mol_type = other DNA; mol_type = other DNA
gtcctccccaacccggccacccata

SEQ ID NO: 11749 - DNA, 25 bp, synthetic construct
  source 1..25: mol_type = other DNA; mol_type = other DNA
tgtcctccccaacccggccacccgt

SEQ ID NO: 11750 - DNA, 25 bp, synthetic construct
  source 1..25: mol_type = other DNA; mol_type = other DNA
tgtcctccccaacccggccacccat

SEQ ID NO: 11751 - DNA, 25 bp, synthetic construct
  source 1..25: mol_type = other DNA; mol_type = other DNA
tgtcctccccaacccgaccacccat

SEQ ID NO: 11752 - DNA, 25 bp, synthetic construct
  source 1..25: mol_type = other DNA; mol_type = other DNA
atgtcctccccaacccggccacccg

SEQ ID NO: 11753 - DNA, 25 bp, synthetic construct
  source 1..25: mol_type = other DNA; mol_type = other DNA
atgtcctccccaacccggccaccca

SEQ ID NO: 11754 - DNA, 25 bp, synthetic construct
  source 1..25: mol_type = other DNA; mol_type = other DNA
atgtcctccccaacccgaccaccca

SEQ ID NO: 11755 - DNA, 25 bp, synthetic construct
  source 1..25: mol_type = other DNA; mol_type = other DNA
catgtcctccccaacccgaccaccc

SEQ ID NO: 11756 - DNA, 25 bp, synthetic construct
  source 1..25: mol_type = other DNA; mol_type = other DNA
catgtcctccccaacccaaccaccc

SEQ ID NO: 11757 - DNA, 25 bp, synthetic construct
  source 1..25: mol_type = other DNA; mol_type = other DNA
ccatgtcctccccaacccggccacc

SEQ ID NO: 11758 - DNA, 25 bp, synthetic construct
  source 1..25: mol_type = other DNA; mol_type = other DNA
ccatgtcctccccaacccgaccacc

SEQ ID NO: 11759 - DNA, 25 bp, synthetic construct
  source 1..25: mol_type = other DNA; mol_type = other DNA
ccatgtcctccccaacccaaccacc

SEQ ID NO: 11760 - DNA, 25 bp, synthetic construct
  source 1..25: mol_type = other DNA; mol_type = other DNA
gccatgtcctccccaacccggccac

SEQ ID NO: 11761 - DNA, 25 bp, synthetic construct
  source 1..25: mol_type = other DNA; mol_type = other DNA
gccatgtcctccccaacccgaccac

SEQ ID NO: 11762 - DNA, 25 bp, synthetic construct
  source 1..25: mol_type = other DNA; mol_type = other DNA
gccatgtcctccccaacccaaccac

SEQ ID NO: 11763 - DNA, 25 bp, synthetic construct
  source 1..25: mol_type = other DNA; mol_type = other DNA
tgccatgtcctccccaacccgacca

SEQ ID NO: 11764 - DNA, 25 bp, synthetic construct
  source 1..25: mol_type = other DNA; mol_type = other DNA
tgccatgtcctccccaacccaacca

SEQ ID NO: 11765 - DNA, 25 bp, synthetic construct
  source 1..25: mol_type = other DNA; mol_type = other DNA
ctgccatgtcctccccaacccggcc

SEQ ID NO: 11766 - DNA, 25 bp, synthetic construct
  source 1..25: mol_type = other DNA; mol_type = other DNA
ctgccatgtcctccccaacccgacc

SEQ ID NO: 11767 - DNA, 25 bp, synthetic construct
  source 1..25: mol_type = other DNA; mol_type = other DNA
ctgccatgtcctccccaacccaacc

SEQ ID NO: 11768 - DNA, 25 bp, synthetic construct
  source 1..25: mol_type = other DNA; mol_type = other DNA
actgccatgtcctccccaacccggc

SEQ ID NO: 11769 - DNA, 25 bp, synthetic construct
  source 1..25: mol_type = other DNA; mol_type = other DNA
actgccatgtcctccccaacccgac

SEQ ID NO: 11770 - DNA, 25 bp, synthetic construct
  source 1..25: mol_type = other DNA; mol_type = other DNA
actgccatgtcctccccaacccaac

SEQ ID NO: 11771 - DNA, 25 bp, synthetic construct
  source 1..25: mol_type = other DNA; mol_type = other DNA
cactgccatgtcctccccaacccga

SEQ ID NO: 11772 - DNA, 25 bp, synthetic construct
  source 1..25: mol_type = other DNA; mol_type = other DNA
cactgccatgtcctccccaacccaa

SEQ ID NO: 11773 - DNA, 25 bp, synthetic construct
  source 1..25: mol_type = other DNA; mol_type = other DNA
ccactgccatgtcctccccaacccg

SEQ ID NO: 11774 - DNA, 25 bp, synthetic construct
  source 1..25: mol_type = other DNA; mol_type = other DNA
ccactgccatgtcctccccaaccca

SEQ ID NO: 11775 - DNA, 25 bp, synthetic construct
  source 1..25: mol_type = other DNA; mol_type = other DNA
ccactgccatatcctccccaaccca

SEQ ID NO: 11776 - DNA, 25 bp, synthetic construct
  source 1..25: mol_type = other DNA; mol_type = other DNA
cccactgccatgtcctccccaaccc

SEQ ID NO: 11777 - DNA, 25 bp, synthetic construct
  source 1..25: mol_type = other DNA; mol_type = other DNA
cccactgccatatcctccccaaccc

SEQ ID NO: 11778 - DNA, 25 bp, synthetic construct
  source 1..25: mol_type = other DNA; mol_type = other DNA
cccactaccatatcctccccaaccc

SEQ ID NO: 11779 - DNA, 25 bp, synthetic construct
  source 1..25: mol_type = other DNA; mol_type = other DNA
ccccactgccatatcctccccaacc

SEQ ID NO: 11780 - DNA, 25 bp, synthetic construct
  source 1..25: mol_type = other DNA; mol_type = other DNA
ccccactaccatatcctccccaacc

SEQ ID NO: 11781 - DNA, 25 bp, synthetic construct
  source 1..25: mol_type = other DNA; mol_type = other DNA
gccccactgccatgtcctccccaac

SEQ ID NO: 11782 - DNA, 25 bp, synthetic construct
  source 1..25: mol_type = other DNA; mol_type = other DNA
gccccactgccatatcctccccaac

SEQ ID NO: 11783 - DNA, 25 bp, synthetic construct
  source 1..25: mol_type = other DNA; mol_type = other DNA
gccccactaccatatcctccccaac

SEQ ID NO: 11784 - DNA, 25 bp, synthetic construct
  source 1..25: mol_type = other DNA; mol_type = other DNA
tgccccactgccatgtcctccccaa

SEQ ID NO: 11785 - DNA, 25 bp, synthetic construct
  source 1..25: mol_type = other DNA; mol_type = other DNA
tgccccactgccatatcctccccaa

SEQ ID NO: 11786 - DNA, 25 bp, synthetic construct
  source 1..25: mol_type = other DNA; mol_type = other DNA
tgccccactaccatatcctccccaa

SEQ ID NO: 11787 - DNA, 25 bp, synthetic construct
  source 1..25: mol_type = other DNA; mol_type = other DNA
ctgccccactgccatatcctcccca

SEQ ID NO: 11788 - DNA, 25 bp, synthetic construct
  source 1..25: mol_type = other DNA; mol_type = other DNA
ctgccccactaccatatcctcccca

SEQ ID NO: 11789 - DNA, 25 bp, synthetic construct
  source 1..25: mol_type = other DNA; mol_type = other DNA
cctgccccactgccatgtcctcccc

SEQ ID NO: 11790 - DNA, 25 bp, synthetic construct
  source 1..25: mol_type = other DNA; mol_type = other DNA
cctgccccactgccatatcctcccc

SEQ ID NO: 11791 - DNA, 25 bp, synthetic construct
  source 1..25: mol_type = other DNA; mol_type = other DNA
cctgccccactaccatatcctcccc

SEQ ID NO: 11792 - DNA, 25 bp, synthetic construct
  source 1..25: mol_type = other DNA; mol_type = other DNA
tcctgccccactgccatgtcctccc

SEQ ID NO: 11793 - DNA, 25 bp, synthetic construct
  source 1..25: mol_type = other DNA; mol_type = other DNA
tcctgccccactgccatatcctccc

SEQ ID NO: 11794 - DNA, 25 bp, synthetic construct
  source 1..25: mol_type = other DNA; mol_type = other DNA
tcctgccccactaccatatcctccc

SEQ ID NO: 11795 - DNA, 25 bp, synthetic construct
  source 1..25: mol_type = other DNA; mol_type = other DNA
ctcctgccccactgccatatcctcc

SEQ ID NO: 11796 - DNA, 25 bp, synthetic construct
  source 1..25: mol_type = other DNA; mol_type = other DNA
ctcctgccccactaccatatcctcc

SEQ ID NO: 11797 - DNA, 25 bp, synthetic construct
  source 1..25: mol_type = other DNA; mol_type = other DNA
cctcctgccccactgccatgtcctc

SEQ ID NO: 11798 - DNA, 25 bp, synthetic construct
  source 1..25: mol_type = other DNA; mol_type = other DNA
cctcctgccccactgccatatcctc

SEQ ID NO: 11799 - DNA, 25 bp, synthetic construct
  source 1..25: mol_type = other DNA; mol_type = other DNA
cctcctgccccactaccatatcctc

SEQ ID NO: 11800 - DNA, 25 bp, synthetic construct
  source 1..25: mol_type = other DNA; mol_type = other DNA
acctcctgccccactgccatgtcct

SEQ ID NO: 11801 - DNA, 25 bp, synthetic construct
  source 1..25: mol_type = other DNA; mol_type = other DNA
acctcctgccccactgccatatcct

SEQ ID NO: 11802 - DNA, 25 bp, synthetic construct
  source 1..25: mol_type = other DNA; mol_type = other DNA
acctcctgccccactaccatatcct

SEQ ID NO: 11803 - DNA, 25 bp, synthetic construct
  source 1..25: mol_type = other DNA; mol_type = other DNA
cacctcctgccccactgccatatcc

SEQ ID NO: 11804 - DNA, 25 bp, synthetic construct
  source 1..25: mol_type = other DNA; mol_type = other DNA
cacctcctgccccactaccatatcc

SEQ ID NO: 11805 - DNA, 25 bp, synthetic construct
  source 1..25: mol_type = other DNA; mol_type = other DNA
ccacctcctgccccactgccatgtc

SEQ ID NO: 11806 - DNA, 25 bp, synthetic construct
  source 1..25: mol_type = other DNA; mol_type = other DNA
ccacctcctgccccactgccatatc

SEQ ID NO: 11807 - DNA, 25 bp, synthetic construct
  source 1..25: mol_type = other DNA; mol_type = other DNA
ccacctcctgccccactaccatatc

SEQ ID NO: 11808 - DNA, 25 bp, synthetic construct
  source 1..25: mol_type = other DNA; mol_type = other DNA
gccacctcctgccccactgccatgt

SEQ ID NO: 11809 - DNA, 25 bp, synthetic construct
  source 1..25: mol_type = other DNA; mol_type = other DNA
gccacctcctgccccactgccatat

SEQ ID NO: 11810 - DNA, 25 bp, synthetic construct
  source 1..25: mol_type = other DNA; mol_type = other DNA
gccacctcctgccccactaccatat

SEQ ID NO: 11811 - DNA, 25 bp, synthetic construct
  source 1..25: mol_type = other DNA; mol_type = other DNA
ggccacctcctgccccactgccata

SEQ ID NO: 11812 - DNA, 25 bp, synthetic construct
  source 1..25: mol_type = other DNA; mol_type = other DNA
ggccacctcctgccccactaccata

SEQ ID NO: 11813 - DNA, 25 bp, synthetic construct
  source 1..25: mol_type = other DNA; mol_type = other DNA
gggccacctcctgccccactgccat

SEQ ID NO: 11814 - DNA, 25 bp, synthetic construct
  source 1..25: mol_type = other DNA; mol_type = other DNA
gggccacctcctgccccactaccat

SEQ ID NO: 11815 - DNA, 25 bp, synthetic construct
  source 1..25: mol_type = other DNA; mol_type = other DNA
gggccacctcctaccccactaccat

SEQ ID NO: 11816 - DNA, 25 bp, synthetic construct
  source 1..25: mol_type = other DNA; mol_type = other DNA
tgggccacctcctgccccactgcca

SEQ ID NO: 11817 - DNA, 25 bp, synthetic construct
  source 1..25: mol_type = other DNA; mol_type = other DNA
tgggccacctcctgccccactacca

SEQ ID NO: 11818 - DNA, 25 bp, synthetic construct
  source 1..25: mol_type = other DNA; mol_type = other DNA
tgggccacctcctaccccactacca

SEQ ID NO: 11819 - DNA, 25 bp, synthetic construct
  source 1..25: mol_type = other DNA; mol_type = other DNA
ctgggccacctcctgccccactacc

SEQ ID NO: 11820 - DNA, 25 bp, synthetic construct
  source 1..25: mol_type = other DNA; mol_type = other DNA
ctgggccacctcctaccccactacc

SEQ ID NO: 11821 - DNA, 25 bp, synthetic construct
  source 1..25: mol_type = other DNA; mol_type = other DNA
cctgggccacctcctgccccactgc

SEQ ID NO: 11822 - DNA, 25 bp, synthetic construct
  source 1..25: mol_type = other DNA; mol_type = other DNA
cctgggccacctcctgccccactac

SEQ ID NO: 11823 - DNA, 25 bp, synthetic construct
  source 1..25: mol_type = other DNA; mol_type = other DNA
cctgggccacctcctaccccactac

SEQ ID NO: 11824 - DNA, 25 bp, synthetic construct
  source 1..25: mol_type = other DNA; mol_type = other DNA
gcctgggccacctcctgccccactg

SEQ ID NO: 11825 - DNA, 25 bp, synthetic construct
  source 1..25: mol_type = other DNA; mol_type = other DNA
gcctgggccacctcctgccccacta

SEQ ID NO: 11826 - DNA, 25 bp, synthetic construct
  source 1..25: mol_type = other DNA; mol_type = other DNA
gcctgggccacctcctaccccacta

SEQ ID NO: 11827 - DNA, 25 bp, synthetic construct
  source 1..25: mol_type = other DNA; mol_type = other DNA
tgcctgggccacctcctaccccact

SEQ ID NO: 11828 - DNA, 25 bp, synthetic construct
  source 1..25: mol_type = other DNA; mol_type = other DNA
tgcctggaccacctcctaccccact

SEQ ID NO: 11829 - DNA, 25 bp, synthetic construct
  source 1..25: mol_type = other DNA; mol_type = other DNA
ctgcctgggccacctcctgccccac

SEQ ID NO: 11830 - DNA, 25 bp, synthetic construct
  source 1..25: mol_type = other DNA; mol_type = other DNA
ctgcctgggccacctcctaccccac

SEQ ID NO: 11831 - DNA, 25 bp, synthetic construct
  source 1..25: mol_type = other DNA; mol_type = other DNA
ctgcctggaccacctcctaccccac

SEQ ID NO: 11832 - DNA, 25 bp, synthetic construct
  source 1..25: mol_type = other DNA; mol_type = other DNA
gctgcctgggccacctcctgcccca

SEQ ID NO: 11833 - DNA, 25 bp, synthetic construct
  source 1..25: mol_type = other DNA; mol_type = other DNA
gctgcctgggccacctcctacccca

SEQ ID NO: 11834 - DNA, 25 bp, synthetic construct
  source 1..25: mol_type = other DNA; mol_type = other DNA
gctgcctggaccacctcctacccca

SEQ ID NO: 11835 - DNA, 25 bp, synthetic construct
  source 1..25: mol_type = other DNA; mol_type = other DNA
agctgcctgggccacctcctacccc

SEQ ID NO: 11836 - DNA, 25 bp, synthetic construct
  source 1..25: mol_type = other DNA; mol_type = other DNA
agctgcctggaccacctcctacccc

SEQ ID NO: 11837 - DNA, 25 bp, synthetic construct
  source 1..25: mol_type = other DNA; mol_type = other DNA
cagctgcctgggccacctcctgccc

SEQ ID NO: 11838 - DNA, 25 bp, synthetic construct
  source 1..25: mol_type = other DNA; mol_type = other DNA
cagctgcctgggccacctcctaccc

SEQ ID NO: 11839 - DNA, 25 bp, synthetic construct
  source 1..25: mol_type = other DNA; mol_type = other DNA
cagctgcctggaccacctcctaccc

SEQ ID NO: 11840 - DNA, 25 bp, synthetic construct
  source 1..25: mol_type = other DNA; mol_type = other DNA
tcagctgcctgggccacctcctgcc

SEQ ID NO: 11841 - DNA, 25 bp, synthetic construct
  source 1..25: mol_type = other DNA; mol_type = other DNA
tcagctgcctgggccacctcctacc

SEQ ID NO: 11842 - DNA, 25 bp, synthetic construct
  source 1..25: mol_type = other DNA; mol_type = other DNA
tcagctgcctggaccacctcctacc

SEQ ID NO: 11843 - DNA, 25 bp, synthetic construct
  source 1..25: mol_type = other DNA; mol_type = other DNA
ctcagctgcctgggccacctcctac

SEQ ID NO: 11844 - DNA, 25 bp, synthetic construct
  source 1..25: mol_type = other DNA; mol_type = other DNA
ctcagctgcctggaccacctcctac

SEQ ID NO: 11845 - DNA, 25 bp, synthetic construct
  source 1..25: mol_type = other DNA; mol_type = other DNA
tctcagctgcctgggccacctcctg

SEQ ID NO: 11846 - DNA, 25 bp, synthetic construct
  source 1..25: mol_type = other DNA; mol_type = other DNA
tctcagctgcctgggccacctccta

SEQ ID NO: 11847 - DNA, 25 bp, synthetic construct
  source 1..25: mol_type = other DNA; mol_type = other DNA
tctcagctgcctggaccacctccta

SEQ ID NO: 11848 - DNA, 25 bp, synthetic construct
  source 1..25: mol_type = other DNA; mol_type = other DNA
atctcagctgcctgggccacctcct

SEQ ID NO: 11849 - DNA, 25 bp, synthetic construct
  source 1..25: mol_type = other DNA; mol_type = other DNA
atctcagctgcctggaccacctcct

SEQ ID NO: 11850 - DNA, 25 bp, synthetic construct
  source 1..25: mol_type = other DNA; mol_type = other DNA
atctcagctgcctgaaccacctcct

SEQ ID NO: 11851 - DNA, 25 bp, synthetic construct
  source 1..25: mol_type = other DNA; mol_type = other DNA
catctcagctgcctggaccacctcc

SEQ ID NO: 11852 - DNA, 25 bp, synthetic construct
  source 1..25: mol_type = other DNA; mol_type = other DNA
catctcagctgcctgaaccacctcc

SEQ ID NO: 11853 - DNA, 25 bp, synthetic construct
  source 1..25: mol_type = other DNA; mol_type = other DNA
ccatctcagctgcctgggccacctc

SEQ ID NO: 11854 - DNA, 25 bp, synthetic construct
  source 1..25: mol_type = other DNA; mol_type = other DNA
ccatctcagctgcctggaccacctc

SEQ ID NO: 11855 - DNA, 25 bp, synthetic construct
  source 1..25: mol_type = other DNA; mol_type = other DNA
ccatctcagctgcctgaaccacctc

SEQ ID NO: 11856 - DNA, 25 bp, synthetic construct
  source 1..25: mol_type = other DNA; mol_type = other DNA
tccatctcagctgcctgggccacct

SEQ ID NO: 11857 - DNA, 25 bp, synthetic construct
  source 1..25: mol_type = other DNA; mol_type = other DNA
tccatctcagctgcctggaccacct

SEQ ID NO: 11858 - DNA, 25 bp, synthetic construct
  source 1..25: mol_type = other DNA; mol_type = other DNA
tccatctcagctgcctgaaccacct

SEQ ID NO: 11859 - DNA, 25 bp, synthetic construct
  source 1..25: mol_type = other DNA; mol_type = other DNA
ctccatctcagctgcctggaccacc

SEQ ID NO: 11860 - DNA, 25 bp, synthetic construct
  source 1..25: mol_type = other DNA; mol_type = other DNA
ctccatctcagctgcctgaaccacc

SEQ ID NO: 11861 - DNA, 25 bp, synthetic construct
  source 1..25: mol_type = other DNA; mol_type = other DNA
gctccatctcagctgcctgggccac

SEQ ID NO: 11862 - DNA, 25 bp, synthetic construct
  source 1..25: mol_type = other DNA; mol_type = other DNA
gctccatctcagctgcctggaccac

SEQ ID NO: 11863 - DNA, 25 bp, synthetic construct
  source 1..25: mol_type = other DNA; mol_type = other DNA
gctccatctcagctgcctgaaccac

SEQ ID NO: 11864 - DNA, 25 bp, synthetic construct
  source 1..25: mol_type = other DNA; mol_type = other DNA
ggctccatctcagctgcctgggcca

SEQ ID NO: 11865 - DNA, 25 bp, synthetic construct
  source 1..25: mol_type = other DNA; mol_type = other DNA
ggctccatctcagctgcctggacca

SEQ ID NO: 11866 - DNA, 25 bp, synthetic construct
  source 1..25: mol_type = other DNA; mol_type = other DNA
ggctccatctcagctgcctgaacca

SEQ ID NO: 11867 - DNA, 25 bp, synthetic construct
  source 1..25: mol_type = other DNA; mol_type = other DNA
aggctccatctcagctgcctggacc

SEQ ID NO: 11868 - DNA, 25 bp, synthetic construct
  source 1..25: mol_type = other DNA; mol_type = other DNA
aggctccatctcagctgcctgaacc

SEQ ID NO: 11869 - DNA, 25 bp, synthetic construct
  source 1..25: mol_type = other DNA; mol_type = other DNA
gaggctccatctcagctgcctgggc

SEQ ID NO: 11870 - DNA, 25 bp, synthetic construct
  source 1..25: mol_type = other DNA; mol_type = other DNA
gaggctccatctcagctgcctggac

SEQ ID NO: 11871 - DNA, 25 bp, synthetic construct
  source 1..25: mol_type = other DNA; mol_type = other DNA
gaggctccatctcagctgcctgaac

SEQ ID NO: 11872 - DNA, 25 bp, synthetic construct
  source 1..25: mol_type = other DNA; mol_type = other DNA
ggaggctccatctcagctgcctggg

SEQ ID NO: 11873 - DNA, 25 bp, synthetic construct
  source 1..25: mol_type = other DNA; mol_type = other DNA
ggaggctccatctcagctgcctgga

SEQ ID NO: 11874 - DNA, 25 bp, synthetic construct
  source 1..25: mol_type = other DNA; mol_type = other DNA
ggaggctccatctcagctgcctgaa

SEQ ID NO: 11875 - DNA, 25 bp, synthetic construct
  source 1..25: mol_type = other DNA; mol_type = other DNA
aggaggctccatctcagctgcctga

SEQ ID NO: 11876 - DNA, 25 bp, synthetic construct
  source 1..25: mol_type = other DNA; mol_type = other DNA
aggaggctccatctcagctgcctaa

SEQ ID NO: 11877 - DNA, 25 bp, synthetic construct
  source 1..25: mol_type = other DNA; mol_type = other DNA
aaggaggctccatctcagctgcctg

SEQ ID NO: 11878 - DNA, 25 bp, synthetic construct
  source 1..25: mol_type = other DNA; mol_type = other DNA
aaggaggctccatctcagctgccta

SEQ ID NO: 11879 - DNA, 25 bp, synthetic construct
  source 1..25: mol_type = other DNA; mol_type = other DNA
aaggaggctccatctcagctaccta

SEQ ID NO: 11880 - DNA, 25 bp, synthetic construct
  source 1..25: mol_type = other DNA; mol_type = other DNA
caaggaggctccatctcagctgcct

SEQ ID NO: 11881 - DNA, 25 bp, synthetic construct
  source 1..25: mol_type = other DNA; mol_type = other DNA
caaggaggctccatctcagctacct

SEQ ID NO: 11882 - DNA, 25 bp, synthetic construct
  source 1..25: mol_type = other DNA; mol_type = other DNA
caaggaggctccatctcaactacct

SEQ ID NO: 11883 - DNA, 25 bp, synthetic construct
  source 1..25: mol_type = other DNA; mol_type = other DNA
gcaaggaggctccatctcagctacc

SEQ ID NO: 11884 - DNA, 25 bp, synthetic construct
  source 1..25: mol_type = other DNA; mol_type = other DNA
gcaaggaggctccatctcaactacc

SEQ ID NO: 11885 - DNA, 25 bp, synthetic construct
  source 1..25: mol_type = other DNA; mol_type = other DNA
agcaaggaggctccatctcagctgc

SEQ ID NO: 11886 - DNA, 25 bp, synthetic construct
  source 1..25: mol_type = other DNA; mol_type = other DNA
agcaaggaggctccatctcagctac

SEQ ID NO: 11887 - DNA, 25 bp, synthetic construct
  source 1..25: mol_type = other DNA; mol_type = other DNA
agcaaggaggctccatctcaactac

SEQ ID NO: 11888 - DNA, 25 bp, synthetic construct
  source 1..25: mol_type = other DNA; mol_type = other DNA
cagcaaggaggctccatctcagctg

SEQ ID NO: 11889 - DNA, 25 bp, synthetic construct
  source 1..25: mol_type = other DNA; mol_type = other DNA
cagcaaggaggctccatctcagcta

SEQ ID NO: 11890 - DNA, 25 bp, synthetic construct
  source 1..25: mol_type = other DNA; mol_type = other DNA
cagcaaggaggctccatctcaacta

SEQ ID NO: 11891 - DNA, 25 bp, synthetic construct
  source 1..25: mol_type = other DNA; mol_type = other DNA
acagcaaggaggctccatctcaact

SEQ ID NO: 11892 - DNA, 25 bp, synthetic construct
  source 1..25: mol_type = other DNA; mol_type = other DNA
acagcaaggagactccatctcaact

SEQ ID NO: 11893 - DNA, 25 bp, synthetic construct
  source 1..25: mol_type = other DNA; mol_type = other DNA
cacagcaaggaggctccatctcagc

SEQ ID NO: 11894 - DNA, 25 bp, synthetic construct
  source 1..25: mol_type = other DNA; mol_type = other DNA
cacagcaaggaggctccatctcaac

SEQ ID NO: 11895 - DNA, 25 bp, synthetic construct
  source 1..25: mol_type = other DNA; mol_type = other DNA
cacagcaaggagactccatctcaac

SEQ ID NO: 11896 - DNA, 25 bp, synthetic construct
  source 1..25: mol_type = other DNA; mol_type = other DNA
gcacagcaaggaggctccatctcaa

SEQ ID NO: 11897 - DNA, 25 bp, synthetic construct
  source 1..25: mol_type = other DNA; mol_type = other DNA
gcacagcaaggagactccatctcaa

SEQ ID NO: 11898 - DNA, 25 bp, synthetic construct
  source 1..25: mol_type = other DNA; mol_type = other DNA
tgcacagcaaggagactccatctca

SEQ ID NO: 11899 - DNA, 25 bp, synthetic construct
  source 1..25: mol_type = other DNA; mol_type = other DNA
tgcacagcaaggaaactccatctca

SEQ ID NO: 11900 - DNA, 25 bp, synthetic construct
  source 1..25: mol_type = other DNA; mol_type = other DNA
ctgcacagcaaggaggctccatctc

SEQ ID NO: 11901 - DNA, 25 bp, synthetic construct
  source 1..25: mol_type = other DNA; mol_type = other DNA
ctgcacagcaaggagactccatctc

SEQ ID NO: 11902 - DNA, 25 bp, synthetic construct
  source 1..25: mol_type = other DNA; mol_type = other DNA
ctgcacagcaaggaaactccatctc

SEQ ID NO: 11903 - DNA, 25 bp, synthetic construct
  source 1..25: mol_type = other DNA; mol_type = other DNA
tctgcacagcaaggaggctccatct

SEQ ID NO: 11904 - DNA, 25 bp, synthetic construct
  source 1..25: mol_type = other DNA; mol_type = other DNA
tctgcacagcaaggagactccatct

SEQ ID NO: 11905 - DNA, 25 bp, synthetic construct
  source 1..25: mol_type = other DNA; mol_type = other DNA
tctgcacagcaaggaaactccatct

SEQ ID NO: 11906 - DNA, 25 bp, synthetic construct
  source 1..25: mol_type = other DNA; mol_type = other DNA
ctctgcacagcaaggagactccatc

SEQ ID NO: 11907 - DNA, 25 bp, synthetic construct
  source 1..25: mol_type = other DNA; mol_type = other DNA
ctctgcacagcaaggaaactccatc

SEQ ID NO: 11908 - DNA, 25 bp, synthetic construct
  source 1..25: mol_type = other DNA; mol_type = other DNA
tctctgcacagcaaggaggctccat

SEQ ID NO: 11909 - DNA, 25 bp, synthetic construct
  source 1..25: mol_type = other DNA; mol_type = other DNA
tctctgcacagcaaggagactccat

SEQ ID NO: 11910 - DNA, 25 bp, synthetic construct
  source 1..25: mol_type = other DNA; mol_type = other DNA
tctctgcacagcaaggaaactccat

SEQ ID NO: 11911 - DNA, 25 bp, synthetic construct
  source 1..25: mol_type = other DNA; mol_type = other DNA
ttctctgcacagcaaggaggctcca

SEQ ID NO: 11912 - DNA, 25 bp, synthetic construct
  source 1..25: mol_type = other DNA; mol_type = other DNA
ttctctgcacagcaaggagactcca

SEQ ID NO: 11913 - DNA, 25 bp, synthetic construct
  source 1..25: mol_type = other DNA; mol_type = other DNA
ttctctgcacagcaaggaaactcca

SEQ ID NO: 11914 - DNA, 25 bp, synthetic construct
  source 1..25: mol_type = other DNA; mol_type = other DNA
cttctctgcacagcaaggagactcc

SEQ ID NO: 11915 - DNA, 25 bp, synthetic construct
  source 1..25: mol_type = other DNA; mol_type = other DNA
cttctctgcacagcaaggaaactcc

SEQ ID NO: 11916 - DNA, 25 bp, synthetic construct
  source 1..25: mol_type = other DNA; mol_type = other DNA
gcttctctgcacagcaaggaggctc

SEQ ID NO: 11917 - DNA, 25 bp, synthetic construct
  source 1..25: mol_type = other DNA; mol_type = other DNA
gcttctctgcacagcaaggagactc

SEQ ID NO: 11918 - DNA, 25 bp, synthetic construct
  source 1..25: mol_type = other DNA; mol_type = other DNA
gcttctctgcacagcaaggaaactc

SEQ ID NO: 11919 - DNA, 25 bp, synthetic construct
  source 1..25: mol_type = other DNA; mol_type = other DNA
agcttctctgcacagcaaggaggct

SEQ ID NO: 11920 - DNA, 25 bp, synthetic construct
  source 1..25: mol_type = other DNA; mol_type = other DNA
agcttctctgcacagcaaggagact

SEQ ID NO: 11921 - DNA, 25 bp, synthetic construct
  source 1..25: mol_type = other DNA; mol_type = other DNA
agcttctctgcacagcaaggaaact

SEQ ID NO: 11922 - DNA, 25 bp, synthetic construct
  source 1..25: mol_type = other DNA; mol_type = other DNA
cagcttctctgcacagcaaggagac

SEQ ID NO: 11923 - DNA, 25 bp, synthetic construct
  source 1..25: mol_type = other DNA; mol_type = other DNA
cagcttctctgcacagcaaggaaac

SEQ ID NO: 11924 - DNA, 25 bp, synthetic construct
  source 1..25: mol_type = other DNA; mol_type = other DNA
ccagcttctctgcacagcaaggagg

SEQ ID NO: 11925 - DNA, 25 bp, synthetic construct
  source 1..25: mol_type = other DNA; mol_type = other DNA
ccagcttctctgcacagcaaggaga

SEQ ID NO: 11926 - DNA, 25 bp, synthetic construct
  source 1..25: mol_type = other DNA; mol_type = other DNA
ccagcttctctgcacagcaaggaaa

SEQ ID NO: 11927 - DNA, 25 bp, synthetic construct
  source 1..25: mol_type = other DNA; mol_type = other DNA
tccagcttctctgcacagcaaggag

SEQ ID NO: 11928 - DNA, 25 bp, synthetic construct
  source 1..25: mol_type = other DNA; mol_type = other DNA
tccagcttctctgcacagcaaggaa

SEQ ID NO: 11929 - DNA, 25 bp, synthetic construct
  source 1..25: mol_type = other DNA; mol_type = other DNA
tccagcttctctgcacagcaagaaa

SEQ ID NO: 11930 - DNA, 25 bp, synthetic construct
  source 1..25: mol_type = other DNA; mol_type = other DNA
gtccagcttctctgcacagcaagaa

SEQ ID NO: 11931 - DNA, 25 bp, synthetic construct
  source 1..25: mol_type = other DNA; mol_type = other DNA
gtccagcttctctgcacagcaaaaa

SEQ ID NO: 11932 - DNA, 25 bp, synthetic construct
  source 1..25: mol_type = other DNA; mol_type = other DNA
cgtccagcttctctgcacagcaagg

SEQ ID NO: 11933 - DNA, 25 bp, synthetic construct
  source 1..25: mol_type = other DNA; mol_type = other DNA
cgtccagcttctctgcacagcaaga

SEQ ID NO: 11934 - DNA, 25 bp, synthetic construct
  source 1..25: mol_type = other DNA; mol_type = other DNA
cgtccagcttctctgcacagcaaaa

SEQ ID NO: 11935 - DNA, 25 bp, synthetic construct
  source 1..25: mol_type = other DNA; mol_type = other DNA
tcgtccagcttctctgcacagcaag

SEQ ID NO: 11936 - DNA, 25 bp, synthetic construct
  source 1..25: mol_type = other DNA; mol_type = other DNA
tcgtccagcttctctgcacagcaaa

SEQ ID NO: 11937 - DNA, 25 bp, synthetic construct
  source 1..25: mol_type = other DNA; mol_type = other DNA
tcgtccagcttctctgcacaacaaa

SEQ ID NO: 11938 - DNA, 25 bp, synthetic construct
  source 1..25: mol_type = other DNA; mol_type = other DNA
ctcgtccagcttctctgcacaacaa

SEQ ID NO: 11939 - DNA, 25 bp, synthetic construct
  source 1..25: mol_type = other DNA; mol_type = other DNA
ctcgtccagcttctctacacaacaa

SEQ ID NO: 11940 - DNA, 25 bp, synthetic construct
  source 1..25: mol_type = other DNA; mol_type = other DNA
tctcgtccagcttctctgcacagca

SEQ ID NO: 11941 - DNA, 25 bp, synthetic construct
  source 1..25: mol_type = other DNA; mol_type = other DNA
tctcgtccagcttctctgcacaaca

SEQ ID NO: 11942 - DNA, 25 bp, synthetic construct
  source 1..25: mol_type = other DNA; mol_type = other DNA
tctcgtccagcttctctacacaaca

SEQ ID NO: 11943 - DNA, 25 bp, synthetic construct
  source 1..25: mol_type = other DNA; mol_type = other DNA
atctcgtccagcttctctgcacagc

SEQ ID NO: 11944 - DNA, 25 bp, synthetic construct
  source 1..25: mol_type = other DNA; mol_type = other DNA
atctcgtccagcttctctgcacaac

SEQ ID NO: 11945 - DNA, 25 bp, synthetic construct
  source 1..25: mol_type = other DNA; mol_type = other DNA
atctcgtccagcttctctacacaac

SEQ ID NO: 11946 - DNA, 25 bp, synthetic construct
  source 1..25: mol_type = other DNA; mol_type = other DNA
catctcgtccagcttctctgcacaa

SEQ ID NO: 11947 - DNA, 25 bp, synthetic construct
  source 1..25: mol_type = other DNA; mol_type = other DNA
catctcgtccagcttctctacacaa

SEQ ID NO: 11948 - DNA, 25 bp, synthetic construct
  source 1..25: mol_type = other DNA; mol_type = other DNA
gcatctcgtccagcttctctgcaca

SEQ ID NO: 11949 - DNA, 25 bp, synthetic construct
  source 1..25: mol_type = other DNA; mol_type = other DNA
gcatctcgtccagcttctctacaca

SEQ ID NO: 11950 - DNA, 25 bp, synthetic construct
  source 1..25: mol_type = other DNA; mol_type = other DNA
gcatctcgtccaacttctctacaca

SEQ ID NO: 11951 - DNA, 25 bp, synthetic construct
  source 1..25: mol_type = other DNA; mol_type = other DNA
agcatctcgtccagcttctctgcac

SEQ ID NO: 11952 - DNA, 25 bp, synthetic construct
  source 1..25: mol_type = other DNA; mol_type = other DNA
agcatctcgtccagcttctctacac

SEQ ID NO: 11953 - DNA, 25 bp, synthetic construct
  source 1..25: mol_type = other DNA; mol_type = other DNA
agcatctcgtccaacttctctacac

SEQ ID NO: 11954 - DNA, 25 bp, synthetic construct
  source 1..25: mol_type = other DNA; mol_type = other DNA
cagcatctcgtccagcttctctaca

SEQ ID NO: 11955 - DNA, 25 bp, synthetic construct
  source 1..25: mol_type = other DNA; mol_type = other DNA
cagcatctcgtccaacttctctaca

SEQ ID NO: 11956 - DNA, 25 bp, synthetic construct
  source 1..25: mol_type = other DNA; mol_type = other DNA
ccagcatctcgtccagcttctctgc

SEQ ID NO: 11957 - DNA, 25 bp, synthetic construct
  source 1..25: mol_type = other DNA; mol_type = other DNA
ccagcatctcgtccagcttctctac

SEQ ID NO: 11958 - DNA, 25 bp, synthetic construct
  source 1..25: mol_type = other DNA; mol_type = other DNA
ccagcatctcgtccaacttctctac

SEQ ID NO: 11959 - DNA, 25 bp, synthetic construct
  source 1..25: mol_type = other DNA; mol_type = other DNA
gccagcatctcgtccagcttctctg

SEQ ID NO: 11960 - DNA, 25 bp, synthetic construct
  source 1..25: mol_type = other DNA; mol_type = other DNA
gccagcatctcgtccagcttctcta

SEQ ID NO: 11961 - DNA, 25 bp, synthetic construct
  source 1..25: mol_type = other DNA; mol_type = other DNA
gccagcatctcgtccaacttctcta

SEQ ID NO: 11962 - DNA, 25 bp, synthetic construct
  source 1..25: mol_type = other DNA; mol_type = other DNA
tgccagcatctcgtccaacttctct

SEQ ID NO: 11963 - DNA, 25 bp, synthetic construct
  source 1..25: mol_type = other DNA; mol_type = other DNA
tgccagcatctcatccaacttctct

SEQ ID NO: 11964 - DNA, 25 bp, synthetic construct
  source 1..25: mol_type = other DNA; mol_type = other DNA
ctgccagcatctcgtccagcttctc

SEQ ID NO: 11965 - DNA, 25 bp, synthetic construct
  source 1..25: mol_type = other DNA; mol_type = other DNA
ctgccagcatctcgtccaacttctc

SEQ ID NO: 11966 - DNA, 25 bp, synthetic construct
  source 1..25: mol_type = other DNA; mol_type = other DNA
ctgccagcatctcatccaacttctc

SEQ ID NO: 11967 - DNA, 25 bp, synthetic construct
  source 1..25: mol_type = other DNA; mol_type = other DNA
gctgccagcatctcgtccagcttct

SEQ ID NO: 11968 - DNA, 25 bp, synthetic construct
  source 1..25: mol_type = other DNA; mol_type = other DNA
gctgccagcatctcgtccaacttct

SEQ ID NO: 11969 - DNA, 25 bp, synthetic construct
  source 1..25: mol_type = other DNA; mol_type = other DNA
gctgccagcatctcatccaacttct

SEQ ID NO: 11970 - DNA, 25 bp, synthetic construct
  source 1..25: mol_type = other DNA; mol_type = other DNA
ggctgccagcatctcgtccaacttc

SEQ ID NO: 11971 - DNA, 25 bp, synthetic construct
  source 1..25: mol_type = other DNA; mol_type = other DNA
ggctgccagcatctcatccaacttc

SEQ ID NO: 11972 - DNA, 25 bp, synthetic construct
  source 1..25: mol_type = other DNA; mol_type = other DNA
cggctgccagcatctcgtccagctt

SEQ ID NO: 11973 - DNA, 25 bp, synthetic construct
  source 1..25: mol_type = other DNA; mol_type = other DNA
cggctgccagcatctcgtccaactt

SEQ ID NO: 11974 - DNA, 25 bp, synthetic construct
  source 1..25: mol_type = other DNA; mol_type = other DNA
cggctgccagcatctcatccaactt

SEQ ID NO: 11975 - DNA, 23 bp, synthetic construct
  source 1..23: mol_type = other DNA; mol_type = other DNA
ggctgccagcatctcgtccagct

SEQ ID NO: 11976 - DNA, 25 bp, synthetic construct
  source 1..25: mol_type = other DNA; mol_type = other DNA
gcggctgccagcatctcgtccagct

SEQ ID NO: 11977 - DNA, 25 bp, synthetic construct
  source 1..25: mol_type = other DNA; mol_type = other DNA
gcggctgccagcatctcgtccaact

SEQ ID NO: 11978 - DNA, 25 bp, synthetic construct
  source 1..25: mol_type = other DNA; mol_type = other DNA
gcggctgccagcatctcatccaact

SEQ ID NO: 11979 - DNA, 25 bp, synthetic construct
  source 1..25: mol_type = other DNA; mol_type = other DNA
ggcggctgccagcatctcgtccaac

SEQ ID NO: 11980 - DNA, 25 bp, synthetic construct
  source 1..25: mol_type = other DNA; mol_type = other DNA
ggcggctgccagcatctcatccaac

SEQ ID NO: 11981 - DNA, 23 bp, synthetic construct
  source 1..23: mol_type = other DNA; mol_type = other DNA
gcggctgccagcatctcgtccag

SEQ ID NO: 11982 - DNA, 25 bp, synthetic construct
  source 1..25: mol_type = other DNA; mol_type = other DNA
cggcggctgccagcatctcgtccag

SEQ ID NO: 11983 - DNA, 25 bp, synthetic construct
  source 1..25: mol_type = other DNA; mol_type = other DNA
cggcggctgccagcatctcgtccaa

SEQ ID NO: 11984 - DNA, 25 bp, synthetic construct
  source 1..25: mol_type = other DNA; mol_type = other DNA
cggcggctgccagcatctcatccaa

SEQ ID NO: 11985 - DNA, 25 bp, synthetic construct
  source 1..25: mol_type = other DNA; mol_type = other DNA
gcggcggctgccagcatctcgtcca

SEQ ID NO: 11986 - DNA, 25 bp, synthetic construct
  source 1..25: mol_type = other DNA; mol_type = other DNA
gcggcggctgccagcatctcatcca

SEQ ID NO: 11987 - DNA, 25 bp, synthetic construct
  source 1..25: mol_type = other DNA; mol_type = other DNA
gcggcggctgccaacatctcatcca

SEQ ID NO: 11988 - DNA, 25 bp, synthetic construct
  source 1..25: mol_type = other DNA; mol_type = other DNA
tgcggcggctgccagcatctcatcc

SEQ ID NO: 11989 - DNA, 25 bp, synthetic construct
  source 1..25: mol_type = other DNA; mol_type = other DNA
tgcggcggctgccaacatctcatcc

SEQ ID NO: 11990 - DNA, 25 bp, synthetic construct
  source 1..25: mol_type = other DNA; mol_type = other DNA
ctgcggcggctgccagcatctcgtc

SEQ ID NO: 11991 - DNA, 25 bp, synthetic construct
  source 1..25: mol_type = other DNA; mol_type = other DNA
ctgcggcggctgccagcatctcatc

SEQ ID NO: 11992 - DNA, 25 bp, synthetic construct
  source 1..25: mol_type = other DNA; mol_type = other DNA
ctgcggcggctgccaacatctcatc

SEQ ID NO: 11993 - DNA, 25 bp, synthetic construct
  source 1..25: mol_type = other DNA; mol_type = other DNA
tctgcggcggctgccagcatctcgt

SEQ ID NO: 11994 - DNA, 25 bp, synthetic construct
  source 1..25: mol_type = other DNA; mol_type = other DNA
tctgcggcggctgccagcatctcat

SEQ ID NO: 11995 - DNA, 25 bp, synthetic construct
  source 1..25: mol_type = other DNA; mol_type = other DNA
tctgcggcggctgccaacatctcat

SEQ ID NO: 11996 - DNA, 25 bp, synthetic construct
  source 1..25: mol_type = other DNA; mol_type = other DNA
ctctgcggcggctgccagcatctca

SEQ ID NO: 11997 - DNA, 25 bp, synthetic construct
  source 1..25: mol_type = other DNA; mol_type = other DNA
ctctgcggcggctgccaacatctca

SEQ ID NO: 11998 - DNA, 25 bp, synthetic construct
  source 1..25: mol_type = other DNA; mol_type = other DNA
gctctgcggcggctgccagcatctc

SEQ ID NO: 11999 - DNA, 25 bp, synthetic construct
  source 1..25: mol_type = other DNA; mol_type = other DNA
gctctgcggcggctgccaacatctc

SEQ ID NO: 12000 - DNA, 25 bp, synthetic construct
  source 1..25: mol_type = other DNA; mol_type = other DNA
gctctgcggcggctaccaacatctc

SEQ ID NO: 12001 - DNA, 25 bp, synthetic construct
  source 1..25: mol_type = other DNA; mol_type = other DNA
ggctctgcggcggctgccagcatct

SEQ ID NO: 12002 - DNA, 25 bp, synthetic construct
  source 1..25: mol_type = other DNA; mol_type = other DNA
ggctctgcggcggctgccaacatct

SEQ ID NO: 12003 - DNA, 25 bp, synthetic construct
  source 1..25: mol_type = other DNA; mol_type = other DNA
ggctctgcggcggctaccaacatct

SEQ ID NO: 12004 - DNA, 25 bp, synthetic construct
  source 1..25: mol_type = other DNA; mol_type = other DNA
tggctctgcggcggctgccaacatc

SEQ ID NO: 12005 - DNA, 25 bp, synthetic construct
  source 1..25: mol_type = other DNA; mol_type = other DNA
tggctctgcggcggctaccaacatc

SEQ ID NO: 12006 - DNA, 25 bp, synthetic construct
  source 1..25: mol_type = other DNA; mol_type = other DNA
ttggctctgcggcggctgccagcat

SEQ ID NO: 12007 - DNA, 25 bp, synthetic construct
  source 1..25: mol_type = other DNA; mol_type = other DNA
ttggctctgcggcggctgccaacat

SEQ ID NO: 12008 - DNA, 25 bp, synthetic construct
  source 1..25: mol_type = other DNA; mol_type = other DNA
ttggctctgcggcggctaccaacat

SEQ ID NO: 12009 - DNA, 25 bp, synthetic construct
  source 1..25: mol_type = other DNA; mol_type = other DNA
gttggctctgcggcggctgccagca

SEQ ID NO: 12010 - DNA, 25 bp, synthetic construct
  source 1..25: mol_type = other DNA; mol_type = other DNA
gttggctctgcggcggctgccaaca

SEQ ID NO: 12011 - DNA, 25 bp, synthetic construct
  source 1..25: mol_type = other DNA; mol_type = other DNA
gttggctctgcggcggctaccaaca

SEQ ID NO: 12012 - DNA, 25 bp, synthetic construct
  source 1..25: mol_type = other DNA; mol_type = other DNA
cgttggctctgcggcggctgccaac

SEQ ID NO: 12013 - DNA, 25 bp, synthetic construct
  source 1..25: mol_type = other DNA; mol_type = other DNA
cgttggctctgcggcggctaccaac

SEQ ID NO: 12014 - DNA, 25 bp, synthetic construct
  source 1..25: mol_type = other DNA; mol_type = other DNA
gcgttggctctgcggcggctgccag

SEQ ID NO: 12015 - DNA, 25 bp, synthetic construct
  source 1..25: mol_type = other DNA; mol_type = other DNA
gcgttggctctgcggcggctgccaa

SEQ ID NO: 12016 - DNA, 25 bp, synthetic construct
  source 1..25: mol_type = other DNA; mol_type = other DNA
gcgttggctctgcggcggctaccaa

SEQ ID NO: 12017 - DNA, 25 bp, synthetic construct
  source 1..25: mol_type = other DNA; mol_type = other DNA
agcgttggctctgcggcggctgcca

SEQ ID NO: 12018 - DNA, 25 bp, synthetic construct
  source 1..25: mol_type = other DNA; mol_type = other DNA
agcgttggctctgcggcggctacca

SEQ ID NO: 12019 - DNA, 25 bp, synthetic construct
  source 1..25: mol_type = other DNA; mol_type = other DNA
agcgttggctctgcggcgactacca

SEQ ID NO: 12020 - DNA, 25 bp, synthetic construct
  source 1..25: mol_type = other DNA; mol_type = other DNA
cagcgttggctctgcggcggctacc

SEQ ID NO: 12021 - DNA, 25 bp, synthetic construct
  source 1..25: mol_type = other DNA; mol_type = other DNA
cagcgttggctctgcggcgactacc

SEQ ID NO: 12022 - DNA, 25 bp, synthetic construct
  source 1..25: mol_type = other DNA; mol_type = other DNA
gcagcgttggctctgcggcggctgc

SEQ ID NO: 12023 - DNA, 25 bp, synthetic construct
  source 1..25: mol_type = other DNA; mol_type = other DNA
gcagcgttggctctgcggcggctac

SEQ ID NO: 12024 - DNA, 25 bp, synthetic construct
  source 1..25: mol_type = other DNA; mol_type = other DNA
gcagcgttggctctgcggcgactac

SEQ ID NO: 12025 - DNA, 25 bp, synthetic construct
  source 1..25: mol_type = other DNA; mol_type = other DNA
cgcagcgttggctctgcggcggctg

SEQ ID NO: 12026 - DNA, 25 bp, synthetic construct
  source 1..25: mol_type = other DNA; mol_type = other DNA
cgcagcgttggctctgcggcggcta

SEQ ID NO: 12027 - DNA, 25 bp, synthetic construct
  source 1..25: mol_type = other DNA; mol_type = other DNA
cgcagcgttggctctgcggcgacta

SEQ ID NO: 12028 - DNA, 25 bp, synthetic construct
  source 1..25: mol_type = other DNA; mol_type = other DNA
ccgcagcgttggctctgcggcgact

SEQ ID NO: 12029 - DNA, 25 bp, synthetic construct
  source 1..25: mol_type = other DNA; mol_type = other DNA
ccgcagcgttggctctgcggcaact

SEQ ID NO: 12030 - DNA, 25 bp, synthetic construct
  source 1..25: mol_type = other DNA; mol_type = other DNA
gccgcagcgttggctctgcggcggc

SEQ ID NO: 12031 - DNA, 25 bp, synthetic construct
  source 1..25: mol_type = other DNA; mol_type = other DNA
gccgcagcgttggctctgcggcgac

SEQ ID NO: 12032 - DNA, 25 bp, synthetic construct
  source 1..25: mol_type = other DNA; mol_type = other DNA
gccgcagcgttggctctgcggcaac

SEQ ID NO: 12033 - DNA, 25 bp, synthetic construct
  source 1..25: mol_type = other DNA; mol_type = other DNA
ggccgcagcgttggctctgcggcgg

SEQ ID NO: 12034 - DNA, 25 bp, synthetic construct
  source 1..25: mol_type = other DNA; mol_type = other DNA
ggccgcagcgttggctctgcggcga

SEQ ID NO: 12035 - DNA, 25 bp, synthetic construct
  source 1..25: mol_type = other DNA; mol_type = other DNA
ggccgcagcgttggctctgcggcaa

SEQ ID NO: 12036 - DNA, 25 bp, synthetic construct
  source 1..25: mol_type = other DNA; mol_type = other DNA
tggccgcagcgttggctctgcggca

SEQ ID NO: 12037 - DNA, 25 bp, synthetic construct
  source 1..25: mol_type = other DNA; mol_type = other DNA
tggccgcagcgttggctctgcgaca

SEQ ID NO: 12038 - DNA, 25 bp, synthetic construct
  source 1..25: mol_type = other DNA; mol_type = other DNA
ctggccgcagcgttggctctgcggc

SEQ ID NO: 12039 - DNA, 25 bp, synthetic construct
  source 1..25: mol_type = other DNA; mol_type = other DNA
ctggccgcagcgttggctctgcgac

SEQ ID NO: 12040 - DNA, 25 bp, synthetic construct
  source 1..25: mol_type = other DNA; mol_type = other DNA
ctggccgcagcgttggctctgcaac

SEQ ID NO: 12041 - DNA, 25 bp, synthetic construct
  source 1..25: mol_type = other DNA; mol_type = other DNA
tctggccgcagcgttggctctgcgg

SEQ ID NO: 12042 - DNA, 25 bp, synthetic construct
  source 1..25: mol_type = other DNA; mol_type = other DNA
tctggccgcagcgttggctctgcga

SEQ ID NO: 12043 - DNA, 25 bp, synthetic construct
  source 1..25: mol_type = other DNA; mol_type = other DNA
tctggccgcagcgttggctctgcaa

SEQ ID NO: 12044 - DNA, 25 bp, synthetic construct
  source 1..25: mol_type = other DNA; mol_type = other DNA
gtctggccgcagcgttggctctgca

SEQ ID NO: 12045 - DNA, 25 bp, synthetic construct
  source 1..25: mol_type = other DNA; mol_type = other DNA
gtctggccgcagcgttggctctaca

SEQ ID NO: 12046 - DNA, 25 bp, synthetic construct
  source 1..25: mol_type = other DNA; mol_type = other DNA
tgtctggccgcagcgttggctctgc

SEQ ID NO: 12047 - DNA, 25 bp, synthetic construct
  source 1..25: mol_type = other DNA; mol_type = other DNA
tgtctggccgcagcgttggctctac

SEQ ID NO: 12048 - DNA, 25 bp, synthetic construct
  source 1..25: mol_type = other DNA; mol_type = other DNA
tgtctggccgcagcgttgactctac

SEQ ID NO: 12049 - DNA, 25 bp, synthetic construct
  source 1..25: mol_type = other DNA; mol_type = other DNA
atgtctggccgcagcgttggctctg

SEQ ID NO: 12050 - DNA, 25 bp, synthetic construct
  source 1..25: mol_type = other DNA; mol_type = other DNA
atgtctggccgcagcgttggctcta

SEQ ID NO: 12051 - DNA, 25 bp, synthetic construct
  source 1..25: mol_type = other DNA; mol_type = other DNA
atgtctggccgcagcgttgactcta

SEQ ID NO: 12052 - DNA, 25 bp, synthetic construct
  source 1..25: mol_type = other DNA; mol_type = other DNA
gatgtctggccgcagcgttgactct

SEQ ID NO: 12053 - DNA, 25 bp, synthetic construct
  source 1..25: mol_type = other DNA; mol_type = other DNA
gatgtctggccgcagcgttaactct

SEQ ID NO: 12054 - DNA, 25 bp, synthetic construct
  source 1..25: mol_type = other DNA; mol_type = other DNA
cgatgtctggccgcagcgttggctc

SEQ ID NO: 12055 - DNA, 25 bp, synthetic construct
  source 1..25: mol_type = other DNA; mol_type = other DNA
cgatgtctggccgcagcgttgactc

SEQ ID NO: 12056 - DNA, 25 bp, synthetic construct
  source 1..25: mol_type = other DNA; mol_type = other DNA
cgatgtctggccgcagcgttaactc

SEQ ID NO: 12057 - DNA, 25 bp, synthetic construct
  source 1..25: mol_type = other DNA; mol_type = other DNA
gcgatgtctggccgcagcgttggct

SEQ ID NO: 12058 - DNA, 25 bp, synthetic construct
  source 1..25: mol_type = other DNA; mol_type = other DNA
gcgatgtctggccgcagcgttgact

SEQ ID NO: 12059 - DNA, 25 bp, synthetic construct
  source 1..25: mol_type = other DNA; mol_type = other DNA
gcgatgtctggccgcagcgttaact

SEQ ID NO: 12060 - DNA, 25 bp, synthetic construct
  source 1..25: mol_type = other DNA; mol_type = other DNA
tgcgatgtctggccgcagcgttgac

SEQ ID NO: 12061 - DNA, 25 bp, synthetic construct
  source 1..25: mol_type = other DNA; mol_type = other DNA
tgcgatgtctggccgcagcgttaac

SEQ ID NO: 12062 - DNA, 25 bp, synthetic construct
  source 1..25: mol_type = other DNA; mol_type = other DNA
ctgcgatgtctggccgcagcgttgg

SEQ ID NO: 12063 - DNA, 25 bp, synthetic construct
  source 1..25: mol_type = other DNA; mol_type = other DNA
ctgcgatgtctggccgcagcgttga

SEQ ID NO: 12064 - DNA, 25 bp, synthetic construct
  source 1..25: mol_type = other DNA; mol_type = other DNA
ctgcgatgtctggccgcagcgttaa

SEQ ID NO: 12065 - DNA, 25 bp, synthetic construct
  source 1..25: mol_type = other DNA; mol_type = other DNA
tctgcgatgtctggccgcagcgttg

SEQ ID NO: 12066 - DNA, 25 bp, synthetic construct
  source 1..25: mol_type = other DNA; mol_type = other DNA
tctgcgatgtctggccgcagcgtta

SEQ ID NO: 12067 - DNA, 25 bp, synthetic construct
  source 1..25: mol_type = other DNA; mol_type = other DNA
tctgcgatgtctggccgcagcatta

SEQ ID NO: 12068 - DNA, 25 bp, synthetic construct
  source 1..25: mol_type = other DNA; mol_type = other DNA
gtctgcgatgtctggccgcagcatt

SEQ ID NO: 12069 - DNA, 25 bp, synthetic construct
  source 1..25: mol_type = other DNA; mol_type = other DNA
gtctgcgatgtctggccgcaacatt

SEQ ID NO: 12070 - DNA, 25 bp, synthetic construct
  source 1..25: mol_type = other DNA; mol_type = other DNA
cgtctgcgatgtctggccgcagcgt

SEQ ID NO: 12071 - DNA, 25 bp, synthetic construct
  source 1..25: mol_type = other DNA; mol_type = other DNA
cgtctgcgatgtctggccgcagcat

SEQ ID NO: 12072 - DNA, 25 bp, synthetic construct
  source 1..25: mol_type = other DNA; mol_type = other DNA
cgtctgcgatgtctggccgcaacat

SEQ ID NO: 12073 - DNA, 25 bp, synthetic construct
  source 1..25: mol_type = other DNA; mol_type = other DNA
gcgtctgcgatgtctggccgcagcg

SEQ ID NO: 12074 - DNA, 25 bp, synthetic construct
  source 1..25: mol_type = other DNA; mol_type = other DNA
gcgtctgcgatgtctggccgcagca

SEQ ID NO: 12075 - DNA, 25 bp, synthetic construct
  source 1..25: mol_type = other DNA; mol_type = other DNA
gcgtctgcgatgtctggccgcaaca

SEQ ID NO: 12076 - DNA, 25 bp, synthetic construct
  source 1..25: mol_type = other DNA; mol_type = other DNA
tgcgtctgcgatgtctggccgcaac

SEQ ID NO: 12077 - DNA, 25 bp, synthetic construct
  source 1..25: mol_type = other DNA; mol_type = other DNA
tgcgtctgcgatgtctggccacaac

SEQ ID NO: 12078 - DNA, 25 bp, synthetic construct
  source 1..25: mol_type = other DNA; mol_type = other DNA
ctgcgtctgcgatgtctggccgcag

SEQ ID NO: 12079 - DNA, 25 bp, synthetic construct
  source 1..25: mol_type = other DNA; mol_type = other DNA
ctgcgtctgcgatgtctggccgcaa

SEQ ID NO: 12080 - DNA, 25 bp, synthetic construct
  source 1..25: mol_type = other DNA; mol_type = other DNA
ctgcgtctgcgatgtctggccacaa

SEQ ID NO: 12081 - DNA, 25 bp, synthetic construct
  source 1..25: mol_type = other DNA; mol_type = other DNA
tctgcgtctgcgatgtctggccgca

SEQ ID NO: 12082 - DNA, 25 bp, synthetic construct
  source 1..25: mol_type = other DNA; mol_type = other DNA
tctgcgtctgcgatgtctggccaca

SEQ ID NO: 12083 - DNA, 25 bp, synthetic construct
  source 1..25: mol_type = other DNA; mol_type = other DNA
tctgcgtctgcgatgtctgaccaca

SEQ ID NO: 12084 - DNA, 25 bp, synthetic construct
  source 1..25: mol_type = other DNA; mol_type = other DNA
gtctgcgtctgcgatgtctggccac

SEQ ID NO: 12085 - DNA, 25 bp, synthetic construct
  source 1..25: mol_type = other DNA; mol_type = other DNA
gtctgcgtctgcgatgtctgaccac

SEQ ID NO: 12086 - DNA, 25 bp, synthetic construct
  source 1..25: mol_type = other DNA; mol_type = other DNA
agtctgcgtctgcgatgtctggccg

SEQ ID NO: 12087 - DNA, 25 bp, synthetic construct
  source 1..25: mol_type = other DNA; mol_type = other DNA
agtctgcgtctgcgatgtctggcca

SEQ ID NO: 12088 - DNA, 25 bp, synthetic construct
  source 1..25: mol_type = other DNA; mol_type = other DNA
agtctgcgtctgcgatgtctgacca

SEQ ID NO: 12089 - DNA, 25 bp, synthetic construct
  source 1..25: mol_type = other DNA; mol_type = other DNA
gagtctgcgtctgcgatgtctggcc

SEQ ID NO: 12090 - DNA, 25 bp, synthetic construct
  source 1..25: mol_type = other DNA; mol_type = other DNA
gagtctgcgtctgcgatgtctgacc

SEQ ID NO: 12091 - DNA, 25 bp, synthetic construct
  source 1..25: mol_type = other DNA; mol_type = other DNA
gagtctgcgtctgcgatgtctaacc

SEQ ID NO: 12092 - DNA, 25 bp, synthetic construct
  source 1..25: mol_type = other DNA; mol_type = other DNA
ggagtctgcgtctgcgatgtctgac

SEQ ID NO: 12093 - DNA, 25 bp, synthetic construct
  source 1..25: mol_type = other DNA; mol_type = other DNA
ggagtctgcgtctgcgatgtctaac

SEQ ID NO: 12094 - DNA, 25 bp, synthetic construct
  source 1..25: mol_type = other DNA; mol_type = other DNA
tggagtctgcgtctgcgatgtctgg

SEQ ID NO: 12095 - DNA, 25 bp, synthetic construct
  source 1..25: mol_type = other DNA; mol_type = other DNA
tggagtctgcgtctgcgatgtctga

SEQ ID NO: 12096 - DNA, 25 bp, synthetic construct
  source 1..25: mol_type = other DNA; mol_type = other DNA
tggagtctgcgtctgcgatgtctaa

SEQ ID NO: 12097 - DNA, 25 bp, synthetic construct
  source 1..25: mol_type = other DNA; mol_type = other DNA
ctggagtctgcgtctgcgatgtctg

SEQ ID NO: 12098 - DNA, 25 bp, synthetic construct
  source 1..25: mol_type = other DNA; mol_type = other DNA
ctggagtctgcgtctgcgatgtcta

SEQ ID NO: 12099 - DNA, 25 bp, synthetic construct
  source 1..25: mol_type = other DNA; mol_type = other DNA
ctggagtctgcgtctgcgatatcta

SEQ ID NO: 12100 - DNA, 25 bp, synthetic construct
  source 1..25: mol_type = other DNA; mol_type = other DNA
tctggagtctgcgtctgcgatatct

SEQ ID NO: 12101 - DNA, 25 bp, synthetic construct
  source 1..25: mol_type = other DNA; mol_type = other DNA
tctggagtctgcgtctgcaatatct

SEQ ID NO: 12102 - DNA, 25 bp, synthetic construct
  source 1..25: mol_type = other DNA; mol_type = other DNA
ctctggagtctgcgtctgcgatgtc

SEQ ID NO: 12103 - DNA, 25 bp, synthetic construct
  source 1..25: mol_type = other DNA; mol_type = other DNA
ctctggagtctgcgtctgcgatatc

SEQ ID NO: 12104 - DNA, 25 bp, synthetic construct
  source 1..25: mol_type = other DNA; mol_type = other DNA
ctctggagtctgcgtctgcaatatc

SEQ ID NO: 12105 - DNA, 25 bp, synthetic construct
  source 1..25: mol_type = other DNA; mol_type = other DNA
gctctggagtctgcgtctgcgatgt

SEQ ID NO: 12106 - DNA, 25 bp, synthetic construct
  source 1..25: mol_type = other DNA; mol_type = other DNA
gctctggagtctgcgtctgcgatat

SEQ ID NO: 12107 - DNA, 25 bp, synthetic construct
  source 1..25: mol_type = other DNA; mol_type = other DNA
gctctggagtctgcgtctgcaatat

SEQ ID NO: 12108 - DNA, 25 bp, synthetic construct
  source 1..25: mol_type = other DNA; mol_type = other DNA
ggctctggagtctgcgtctgcgata

SEQ ID NO: 12109 - DNA, 25 bp, synthetic construct
  source 1..25: mol_type = other DNA; mol_type = other DNA
ggctctggagtctgcgtctgcaata

SEQ ID NO: 12110 - DNA, 25 bp, synthetic construct
  source 1..25: mol_type = other DNA; mol_type = other DNA
cggctctggagtctgcgtctgcgat

SEQ ID NO: 12111 - DNA, 25 bp, synthetic construct
  source 1..25: mol_type = other DNA; mol_type = other DNA
cggctctggagtctgcgtctgcaat

SEQ ID NO: 12112 - DNA, 25 bp, synthetic construct
  source 1..25: mol_type = other DNA; mol_type = other DNA
cggctctggagtctgcgtctacaat

SEQ ID NO: 12113 - DNA, 25 bp, synthetic construct
  source 1..25: mol_type = other DNA; mol_type = other DNA
gcggctctggagtctgcgtctgcga

SEQ ID NO: 12114 - DNA, 25 bp, synthetic construct
  source 1..25: mol_type = other DNA; mol_type = other DNA
gcggctctggagtctgcgtctgcaa

SEQ ID NO: 12115 - DNA, 25 bp, synthetic construct
  source 1..25: mol_type = other DNA; mol_type = other DNA
gcggctctggagtctgcgtctacaa

SEQ ID NO: 12116 - DNA, 25 bp, synthetic construct
  source 1..25: mol_type = other DNA; mol_type = other DNA
ggcggctctggagtctgcgtctgca

SEQ ID NO: 12117 - DNA, 25 bp, synthetic construct
  source 1..25: mol_type = other DNA; mol_type = other DNA
ggcggctctggagtctgcgtctaca

SEQ ID NO: 12118 - DNA, 25 bp, synthetic construct
  source 1..25: mol_type = other DNA; mol_type = other DNA
tggcggctctggagtctgcgtctgc

SEQ ID NO: 12119 - DNA, 25 bp, synthetic construct
  source 1..25: mol_type = other DNA; mol_type = other DNA
tggcggctctggagtctgcgtctac

SEQ ID NO: 12120 - DNA, 25 bp, synthetic construct
  source 1..25: mol_type = other DNA; mol_type = other DNA
tggcggctctggagtctgcatctac

SEQ ID NO: 12121 - DNA, 25 bp, synthetic construct
  source 1..25: mol_type = other DNA; mol_type = other DNA
gtggcggctctggagtctgcgtctg

SEQ ID NO: 12122 - DNA, 25 bp, synthetic construct
  source 1..25: mol_type = other DNA; mol_type = other DNA
gtggcggctctggagtctgcgtcta

SEQ ID NO: 12123 - DNA, 25 bp, synthetic construct
  source 1..25: mol_type = other DNA; mol_type = other DNA
gtggcggctctggagtctgcatcta

SEQ ID NO: 12124 - DNA, 25 bp, synthetic construct
  source 1..25: mol_type = other DNA; mol_type = other DNA
ggtggcggctctggagtctgcatct

SEQ ID NO: 12125 - DNA, 25 bp, synthetic construct
  source 1..25: mol_type = other DNA; mol_type = other DNA
ggtggcggctctggagtctacatct

SEQ ID NO: 12126 - DNA, 25 bp, synthetic construct
  source 1..25: mol_type = other DNA; mol_type = other DNA
cggtggcggctctggagtctgcgtc

SEQ ID NO: 12127 - DNA, 25 bp, synthetic construct
  source 1..25: mol_type = other DNA; mol_type = other DNA
cggtggcggctctggagtctgcatc

SEQ ID NO: 12128 - DNA, 25 bp, synthetic construct
  source 1..25: mol_type = other DNA; mol_type = other DNA
cggtggcggctctggagtctacatc

SEQ ID NO: 12129 - DNA, 25 bp, synthetic construct
  source 1..25: mol_type = other DNA; mol_type = other DNA
acggtggcggctctggagtctgcgt

SEQ ID NO: 12130 - DNA, 25 bp, synthetic construct
  source 1..25: mol_type = other DNA; mol_type = other DNA
acggtggcggctctggagtctgcat

SEQ ID NO: 12131 - DNA, 25 bp, synthetic construct
  source 1..25: mol_type = other DNA; mol_type = other DNA
acggtggcggctctggagtctacat

SEQ ID NO: 12132 - DNA, 25 bp, synthetic construct
  source 1..25: mol_type = other DNA; mol_type = other DNA
gacggtggcggctctggagtctgca

SEQ ID NO: 12133 - DNA, 25 bp, synthetic construct
  source 1..25: mol_type = other DNA; mol_type = other DNA
gacggtggcggctctggagtctaca

SEQ ID NO: 12134 - DNA, 25 bp, synthetic construct
  source 1..25: mol_type = other DNA; mol_type = other DNA
tgacggtggcggctctggagtctgc

SEQ ID NO: 12135 - DNA, 25 bp, synthetic construct
  source 1..25: mol_type = other DNA; mol_type = other DNA
tgacggtggcggctctggagtctac

SEQ ID NO: 12136 - DNA, 25 bp, synthetic construct
  source 1..25: mol_type = other DNA; mol_type = other DNA
tgacggtggcggctctggaatctac

SEQ ID NO: 12137 - DNA, 25 bp, synthetic construct
  source 1..25: mol_type = other DNA; mol_type = other DNA
ttgacggtggcggctctggagtctg

SEQ ID NO: 12138 - DNA, 25 bp, synthetic construct
  source 1..25: mol_type = other DNA; mol_type = other DNA
ttgacggtggcggctctggagtcta

SEQ ID NO: 12139 - DNA, 25 bp, synthetic construct
  source 1..25: mol_type = other DNA; mol_type = other DNA
ttgacggtggcggctctggaatcta

SEQ ID NO: 12140 - DNA, 25 bp, synthetic construct
  source 1..25: mol_type = other DNA; mol_type = other DNA
tttgacggtggcggctctggaatct

SEQ ID NO: 12141 - DNA, 25 bp, synthetic construct
  source 1..25: mol_type = other DNA; mol_type = other DNA
tttgacggtggcggctctgaaatct

SEQ ID NO: 12142 - DNA, 25 bp, synthetic construct
  source 1..25: mol_type = other DNA; mol_type = other DNA
gtttgacggtggcggctctggagtc

SEQ ID NO: 12143 - DNA, 25 bp, synthetic construct
  source 1..25: mol_type = other DNA; mol_type = other DNA
gtttgacggtggcggctctggaatc

SEQ ID NO: 12144 - DNA, 25 bp, synthetic construct
  source 1..25: mol_type = other DNA; mol_type = other DNA
gtttgacggtggcggctctgaaatc

SEQ ID NO: 12145 - DNA, 25 bp, synthetic construct
  source 1..25: mol_type = other DNA; mol_type = other DNA
tgtttgacggtggcggctctggagt

SEQ ID NO: 12146 - DNA, 25 bp, synthetic construct
  source 1..25: mol_type = other DNA; mol_type = other DNA
tgtttgacggtggcggctctggaat

SEQ ID NO: 12147 - DNA, 25 bp, synthetic construct
  source 1..25: mol_type = other DNA; mol_type = other DNA
tgtttgacggtggcggctctgaaat

SEQ ID NO: 12148 - DNA, 25 bp, synthetic construct
  source 1..25: mol_type = other DNA; mol_type = other DNA
ctgtttgacggtggcggctctggaa

SEQ ID NO: 12149 - DNA, 25 bp, synthetic construct
  source 1..25: mol_type = other DNA; mol_type = other DNA
ctgtttgacggtggcggctctgaaa

SEQ ID NO: 12150 - DNA, 25 bp, synthetic construct
  source 1..25: mol_type = other DNA; mol_type = other DNA
tctgtttgacggtggcggctctgga

SEQ ID NO: 12151 - DNA, 25 bp, synthetic construct
  source 1..25: mol_type = other DNA; mol_type = other DNA
tctgtttgacggtggcggctctgaa

SEQ ID NO: 12152 - DNA, 25 bp, synthetic construct
  source 1..25: mol_type = other DNA; mol_type = other DNA
tctgtttgacggtggcggctctaaa

SEQ ID NO: 12153 - DNA, 25 bp, synthetic construct
  source 1..25: mol_type = other DNA; mol_type = other DNA
ctctgtttgacggtggcggctctgg

SEQ ID NO: 12154 - DNA, 25 bp, synthetic construct
  source 1..25: mol_type = other DNA; mol_type = other DNA
ctctgtttgacggtggcggctctga

SEQ ID NO: 12155 - DNA, 25 bp, synthetic construct
  source 1..25: mol_type = other DNA; mol_type = other DNA
ctctgtttgacggtggcggctctaa

SEQ ID NO: 12156 - DNA, 25 bp, synthetic construct
  source 1..25: mol_type = other DNA; mol_type = other DNA
cctctgtttgacggtggcggctcta

SEQ ID NO: 12157 - DNA, 25 bp, synthetic construct
  source 1..25: mol_type = other DNA; mol_type = other DNA
cctctgtttgacggtggcgactcta

SEQ ID NO: 12158 - DNA, 25 bp, synthetic construct
  source 1..25: mol_type = other DNA; mol_type = other DNA
gcctctgtttgacggtggcggctct

SEQ ID NO: 12159 - DNA, 25 bp, synthetic construct
  source 1..25: mol_type = other DNA; mol_type = other DNA
gcctctgtttgacggtggcgactct

SEQ ID NO: 12160 - DNA, 25 bp, synthetic construct
  source 1..25: mol_type = other DNA; mol_type = other DNA
gcctctgtttgacggtggcaactct

SEQ ID NO: 12161 - DNA, 25 bp, synthetic construct
  source 1..25: mol_type = other DNA; mol_type = other DNA
ggcctctgtttgacggtggcggctc

SEQ ID NO: 12162 - DNA, 25 bp, synthetic construct
  source 1..25: mol_type = other DNA; mol_type = other DNA
ggcctctgtttgacggtggcgactc

SEQ ID NO: 12163 - DNA, 25 bp, synthetic construct
  source 1..25: mol_type = other DNA; mol_type = other DNA
ggcctctgtttgacggtggcaactc

SEQ ID NO: 12164 - DNA, 25 bp, synthetic construct
  source 1..25: mol_type = other DNA; mol_type = other DNA
gggcctctgtttgacggtggcgact

SEQ ID NO: 12165 - DNA, 25 bp, synthetic construct
  source 1..25: mol_type = other DNA; mol_type = other DNA
gggcctctgtttgacggtggcaact

SEQ ID NO: 12166 - DNA, 25 bp, synthetic construct
  source 1..25: mol_type = other DNA; mol_type = other DNA
tgggcctctgtttgacggtggcggc

SEQ ID NO: 12167 - DNA, 25 bp, synthetic construct
  source 1..25: mol_type = other DNA; mol_type = other DNA
tgggcctctgtttgacggtggcgac

SEQ ID NO: 12168 - DNA, 25 bp, synthetic construct
  source 1..25: mol_type = other DNA; mol_type = other DNA
tgggcctctgtttgacggtggcaac

SEQ ID NO: 12169 - DNA, 25 bp, synthetic construct
  source 1..25: mol_type = other DNA; mol_type = other DNA
gtgggcctctgtttgacggtggcgg

SEQ ID NO: 12170 - DNA, 25 bp, synthetic construct
  source 1..25: mol_type = other DNA; mol_type = other DNA
gtgggcctctgtttgacggtggcga

SEQ ID NO: 12171 - DNA, 25 bp, synthetic construct
  source 1..25: mol_type = other DNA; mol_type = other DNA
gtgggcctctgtttgacggtggcaa

SEQ ID NO: 12172 - DNA, 25 bp, synthetic construct
  source 1..25: mol_type = other DNA; mol_type = other DNA
ggtgggcctctgtttgacggtggca

SEQ ID NO: 12173 - DNA, 25 bp, synthetic construct
  source 1..25: mol_type = other DNA; mol_type = other DNA
ggtgggcctctgtttgacggtgaca

SEQ ID NO: 12174 - DNA, 25 bp, synthetic construct
  source 1..25: mol_type = other DNA; mol_type = other DNA
tggtgggcctctgtttgacggtggc

SEQ ID NO: 12175 - DNA, 25 bp, synthetic construct
  source 1..25: mol_type = other DNA; mol_type = other DNA
tggtgggcctctgtttgacggtgac

SEQ ID NO: 12176 - DNA, 25 bp, synthetic construct
  source 1..25: mol_type = other DNA; mol_type = other DNA
tggtgggcctctgtttgacggtaac

SEQ ID NO: 12177 - DNA, 25 bp, synthetic construct
  source 1..25: mol_type = other DNA; mol_type = other DNA
ctggtgggcctctgtttgacggtgg

SEQ ID NO: 12178 - DNA, 25 bp, synthetic construct
  source 1..25: mol_type = other DNA; mol_type = other DNA
ctggtgggcctctgtttgacggtga

SEQ ID NO: 12179 - DNA, 25 bp, synthetic construct
  source 1..25: mol_type = other DNA; mol_type = other DNA
ctggtgggcctctgtttgacggtaa

SEQ ID NO: 12180 - DNA, 25 bp, synthetic construct
  source 1..25: mol_type = other DNA; mol_type = other DNA
actggtgggcctctgtttgacggta

SEQ ID NO: 12181 - DNA, 25 bp, synthetic construct
  source 1..25: mol_type = other DNA; mol_type = other DNA
actggtgggcctctgtttgacgata

SEQ ID NO: 12182 - DNA, 25 bp, synthetic construct
  source 1..25: mol_type = other DNA; mol_type = other DNA
gactggtgggcctctgtttgacggt

SEQ ID NO: 12183 - DNA, 25 bp, synthetic construct
  source 1..25: mol_type = other DNA; mol_type = other DNA
gactggtgggcctctgtttgacgat

SEQ ID NO: 12184 - DNA, 25 bp, synthetic construct
  source 1..25: mol_type = other DNA; mol_type = other DNA
gactggtgggcctctgtttgacaat

SEQ ID NO: 12185 - DNA, 25 bp, synthetic construct
  source 1..25: mol_type = other DNA; mol_type = other DNA
cgactggtgggcctctgtttgacgg

SEQ ID NO: 12186 - DNA, 25 bp, synthetic construct
  source 1..25: mol_type = other DNA; mol_type = other DNA
cgactggtgggcctctgtttgacga

SEQ ID NO: 12187 - DNA, 25 bp, synthetic construct
  source 1..25: mol_type = other DNA; mol_type = other DNA
cgactggtgggcctctgtttgacaa

SEQ ID NO: 12188 - DNA, 25 bp, synthetic construct
  source 1..25: mol_type = other DNA; mol_type = other DNA
ccgactggtgggcctctgtttgaca

SEQ ID NO: 12189 - DNA, 25 bp, synthetic construct
  source 1..25: mol_type = other DNA; mol_type = other DNA
ccgactggtgggcctctgtttaaca

SEQ ID NO: 12190 - DNA, 25 bp, synthetic construct
  source 1..25: mol_type = other DNA; mol_type = other DNA
tccgactggtgggcctctgtttgac

SEQ ID NO: 12191 - DNA, 25 bp, synthetic construct
  source 1..25: mol_type = other DNA; mol_type = other DNA
tccgactggtgggcctctgtttaac

SEQ ID NO: 12192 - DNA, 25 bp, synthetic construct
  source 1..25: mol_type = other DNA; mol_type = other DNA
tccgactggtgggcctctatttaac

SEQ ID NO: 12193 - DNA, 25 bp, synthetic construct
  source 1..25: mol_type = other DNA; mol_type = other DNA
ctccgactggtgggcctctgtttga

SEQ ID NO: 12194 - DNA, 25 bp, synthetic construct
  source 1..25: mol_type = other DNA; mol_type = other DNA
ctccgactggtgggcctctgtttaa

SEQ ID NO: 12195 - DNA, 25 bp, synthetic construct
  source 1..25: mol_type = other DNA; mol_type = other DNA
ctccgactggtgggcctctatttaa

SEQ ID NO: 12196 - DNA, 25 bp, synthetic construct
  source 1..25: mol_type = other DNA; mol_type = other DNA
cctccgactggtgggcctctgttta

SEQ ID NO: 12197 - DNA, 25 bp, synthetic construct
  source 1..25: mol_type = other DNA; mol_type = other DNA
cctccgactggtgggcctctattta

SEQ ID NO: 12198 - DNA, 25 bp, synthetic construct
  source 1..25: mol_type = other DNA; mol_type = other DNA
tcctccgactggtgggcctctgttt

SEQ ID NO: 12199 - DNA, 25 bp, synthetic construct
  source 1..25: mol_type = other DNA; mol_type = other DNA
tcctccgactggtgggcctctattt

SEQ ID NO: 12200 - DNA, 25 bp, synthetic construct
  source 1..25: mol_type = other DNA; mol_type = other DNA
tcctccgactggtggacctctattt

SEQ ID NO: 12201 - DNA, 25 bp, synthetic construct
  source 1..25: mol_type = other DNA; mol_type = other DNA
atcctccgactggtgggcctctgtt

SEQ ID NO: 12202 - DNA, 25 bp, synthetic construct
  source 1..25: mol_type = other DNA; mol_type = other DNA
atcctccgactggtgggcctctatt

SEQ ID NO: 12203 - DNA, 25 bp, synthetic construct
  source 1..25: mol_type = other DNA; mol_type = other DNA
atcctccgactggtggacctctatt

SEQ ID NO: 12204 - DNA, 25 bp, synthetic construct
  source 1..25: mol_type = other DNA; mol_type = other DNA
gatcctccgactggtgggcctctat

SEQ ID NO: 12205 - DNA, 25 bp, synthetic construct
  source 1..25: mol_type = other DNA; mol_type = other DNA
gatcctccgactggtggacctctat

SEQ ID NO: 12206 - DNA, 25 bp, synthetic construct
  source 1..25: mol_type = other DNA; mol_type = other DNA
tgatcctccgactggtgggcctctg

SEQ ID NO: 12207 - DNA, 25 bp, synthetic construct
  source 1..25: mol_type = other DNA; mol_type = other DNA
tgatcctccgactggtgggcctcta

SEQ ID NO: 12208 - DNA, 25 bp, synthetic construct
  source 1..25: mol_type = other DNA; mol_type = other DNA
tgatcctccgactggtggacctcta

SEQ ID NO: 12209 - DNA, 25 bp, synthetic construct
  source 1..25: mol_type = other DNA; mol_type = other DNA
gtgatcctccgactggtgggcctct

SEQ ID NO: 12210 - DNA, 25 bp, synthetic construct
  source 1..25: mol_type = other DNA; mol_type = other DNA
gtgatcctccgactggtggacctct

SEQ ID NO: 12211 - DNA, 25 bp, synthetic construct
  source 1..25: mol_type = other DNA; mol_type = other DNA
gtgatcctccgactggtgaacctct

SEQ ID NO: 12212 - DNA, 25 bp, synthetic construct
  source 1..25: mol_type = other DNA; mol_type = other DNA
tgtgatcctccgactggtggacctc

SEQ ID NO: 12213 - DNA, 25 bp, synthetic construct
  source 1..25: mol_type = other DNA; mol_type = other DNA
tgtgatcctccgactggtgaacctc

SEQ ID NO: 12214 - DNA, 25 bp, synthetic construct
  source 1..25: mol_type = other DNA; mol_type = other DNA
gtgtgatcctccgactggtgggcct

SEQ ID NO: 12215 - DNA, 25 bp, synthetic construct
  source 1..25: mol_type = other DNA; mol_type = other DNA
gtgtgatcctccgactggtggacct

SEQ ID NO: 12216 - DNA, 25 bp, synthetic construct
  source 1..25: mol_type = other DNA; mol_type = other DNA
gtgtgatcctccgactggtgaacct

SEQ ID NO: 12217 - DNA, 25 bp, synthetic construct
  source 1..25: mol_type = other DNA; mol_type = other DNA
ggtgtgatcctccgactggtgggcc

SEQ ID NO: 12218 - DNA, 25 bp, synthetic construct
  source 1..25: mol_type = other DNA; mol_type = other DNA
ggtgtgatcctccgactggtggacc

SEQ ID NO: 12219 - DNA, 25 bp, synthetic construct
  source 1..25: mol_type = other DNA; mol_type = other DNA
ggtgtgatcctccgactggtgaacc

SEQ ID NO: 12220 - DNA, 25 bp, synthetic construct
  source 1..25: mol_type = other DNA; mol_type = other DNA
gggtgtgatcctccgactggtggac

SEQ ID NO: 12221 - DNA, 25 bp, synthetic construct
  source 1..25: mol_type = other DNA; mol_type = other DNA
gggtgtgatcctccgactggtgaac

SEQ ID NO: 12222 - DNA, 25 bp, synthetic construct
  source 1..25: mol_type = other DNA; mol_type = other DNA
cgggtgtgatcctccgactggtggg

SEQ ID NO: 12223 - DNA, 25 bp, synthetic construct
  source 1..25: mol_type = other DNA; mol_type = other DNA
cgggtgtgatcctccgactggtgga

SEQ ID NO: 12224 - DNA, 25 bp, synthetic construct
  source 1..25: mol_type = other DNA; mol_type = other DNA
cgggtgtgatcctccgactggtgaa

SEQ ID NO: 12225 - DNA, 25 bp, synthetic construct
  source 1..25: mol_type = other DNA; mol_type = other DNA
gcgggtgtgatcctccgactggtgg

SEQ ID NO: 12226 - DNA, 25 bp, synthetic construct
  source 1..25: mol_type = other DNA; mol_type = other DNA
gcgggtgtgatcctccgactggtga

SEQ ID NO: 12227 - DNA, 25 bp, synthetic construct
  source 1..25: mol_type = other DNA; mol_type = other DNA
gcgggtgtgatcctccgactggtaa

SEQ ID NO: 12228 - DNA, 25 bp, synthetic construct
  source 1..25: mol_type = other DNA; mol_type = other DNA
ggcgggtgtgatcctccgactggta

SEQ ID NO: 12229 - DNA, 25 bp, synthetic construct
  source 1..25: mol_type = other DNA; mol_type = other DNA
ggcgggtgtgatcctccgactgata

SEQ ID NO: 12230 - DNA, 25 bp, synthetic construct
  source 1..25: mol_type = other DNA; mol_type = other DNA
cggcgggtgtgatcctccgactggt

SEQ ID NO: 12231 - DNA, 25 bp, synthetic construct
  source 1..25: mol_type = other DNA; mol_type = other DNA
cggcgggtgtgatcctccgactgat

SEQ ID NO: 12232 - DNA, 25 bp, synthetic construct
  source 1..25: mol_type = other DNA; mol_type = other DNA
cggcgggtgtgatcctccgactaat

SEQ ID NO: 12233 - DNA, 25 bp, synthetic construct
  source 1..25: mol_type = other DNA; mol_type = other DNA
tcggcgggtgtgatcctccgactgg

SEQ ID NO: 12234 - DNA, 25 bp, synthetic construct
  source 1..25: mol_type = other DNA; mol_type = other DNA
tcggcgggtgtgatcctccgactga

SEQ ID NO: 12235 - DNA, 25 bp, synthetic construct
  source 1..25: mol_type = other DNA; mol_type = other DNA
tcggcgggtgtgatcctccgactaa

SEQ ID NO: 12236 - DNA, 25 bp, synthetic construct
  source 1..25: mol_type = other DNA; mol_type = other DNA
ctcggcgggtgtgatcctccgacta

SEQ ID NO: 12237 - DNA, 25 bp, synthetic construct
  source 1..25: mol_type = other DNA; mol_type = other DNA
ctcggcgggtgtgatcctccaacta

SEQ ID NO: 12238 - DNA, 25 bp, synthetic construct
  source 1..25: mol_type = other DNA; mol_type = other DNA
tctcggcgggtgtgatcctccgact

SEQ ID NO: 12239 - DNA, 25 bp, synthetic construct
  source 1..25: mol_type = other DNA; mol_type = other DNA
tctcggcgggtgtgatcctccaact

SEQ ID NO: 12240 - DNA, 25 bp, synthetic construct
  source 1..25: mol_type = other DNA; mol_type = other DNA
tctcggcgggtgtaatcctccaact

SEQ ID NO: 12241 - DNA, 25 bp, synthetic construct
  source 1..25: mol_type = other DNA; mol_type = other DNA
atctcggcgggtgtgatcctccgac

SEQ ID NO: 12242 - DNA, 25 bp, synthetic construct
  source 1..25: mol_type = other DNA; mol_type = other DNA
atctcggcgggtgtgatcctccaac

SEQ ID NO: 12243 - DNA, 25 bp, synthetic construct
  source 1..25: mol_type = other DNA; mol_type = other DNA
atctcggcgggtgtaatcctccaac

SEQ ID NO: 12244 - DNA, 25 bp, synthetic construct
  source 1..25: mol_type = other DNA; mol_type = other DNA
aatctcggcgggtgtgatcctccaa

SEQ ID NO: 12245 - DNA, 25 bp, synthetic construct
  source 1..25: mol_type = other DNA; mol_type = other DNA
aatctcggcgggtgtaatcctccaa

SEQ ID NO: 12246 - DNA, 25 bp, synthetic construct
  source 1..25: mol_type = other DNA; mol_type = other DNA
taatctcggcgggtgtgatcctccg

SEQ ID NO: 12247 - DNA, 25 bp, synthetic construct
  source 1..25: mol_type = other DNA; mol_type = other DNA
taatctcggcgggtgtgatcctcca

SEQ ID NO: 12248 - DNA, 25 bp, synthetic construct
  source 1..25: mol_type = other DNA; mol_type = other DNA
taatctcggcgggtgtaatcctcca

SEQ ID NO: 12249 - DNA, 25 bp, synthetic construct
  source 1..25: mol_type = other DNA; mol_type = other DNA
ctaatctcggcgggtgtgatcctcc

SEQ ID NO: 12250 - DNA, 25 bp, synthetic construct
  source 1..25: mol_type = other DNA; mol_type = other DNA
ctaatctcggcgggtgtaatcctcc

SEQ ID NO: 12251 - DNA, 25 bp, synthetic construct
  source 1..25: mol_type = other DNA; mol_type = other DNA
ctaatctcggcgggtataatcctcc

SEQ ID NO: 12252 - DNA, 25 bp, synthetic construct
  source 1..25: mol_type = other DNA; mol_type = other DNA
gctaatctcggcgggtgtaatcctc

SEQ ID NO: 12253 - DNA, 25 bp, synthetic construct
  source 1..25: mol_type = other DNA; mol_type = other DNA
gctaatctcggcgggtataatcctc

SEQ ID NO: 12254 - DNA, 18 bp, synthetic construct
  source 1..18: mol_type = other DNA; mol_type = other DNA
gatgctgacagaggccac

SEQ ID NO: 12255 - DNA, 18 bp, synthetic construct
  source 1..18: mol_type = other DNA; mol_type = other DNA
gatgctgacagagaccac

SEQ ID NO: 12256 - DNA, 18 bp, synthetic construct
  source 1..18: mol_type = other DNA; mol_type = other DNA
tgatgctgacagaggcca

SEQ ID NO: 12257 - DNA, 18 bp, synthetic construct
  source 1..18: mol_type = other DNA; mol_type = other DNA
tgatgctgacagagacca

SEQ ID NO: 12258 - DNA, 18 bp, synthetic construct
  source 1..18: mol_type = other DNA; mol_type = other DNA
gtgatgctgacagaggcc

SEQ ID NO: 12259 - DNA, 18 bp, synthetic construct
  source 1..18: mol_type = other DNA; mol_type = other DNA
gtgatgctgacagagacc

SEQ ID NO: 12260 - DNA, 18 bp, synthetic construct
  source 1..18: mol_type = other DNA; mol_type = other DNA
cgtgatgctgacagaggc

SEQ ID NO: 12261 - DNA, 18 bp, synthetic construct
  source 1..18: mol_type = other DNA; mol_type = other DNA
cgtgatgctgacagagac

SEQ ID NO: 12262 - DNA, 18 bp, synthetic construct
  source 1..18: mol_type = other DNA; mol_type = other DNA
ccgtgatgctgacagagg

SEQ ID NO: 12263 - DNA, 18 bp, synthetic construct
  source 1..18: mol_type = other DNA; mol_type = other DNA
ccgtgatgctgacagaga

SEQ ID NO: 12264 - DNA, 18 bp, synthetic construct
  source 1..18: mol_type = other DNA; mol_type = other DNA
cccgtgatgctgacagag

SEQ ID NO: 12265 - DNA, 18 bp, synthetic construct
  source 1..18: mol_type = other DNA; mol_type = other DNA
cccgtgatgctgacagaa

SEQ ID NO: 12266 - DNA, 18 bp, synthetic construct
  source 1..18: mol_type = other DNA; mol_type = other DNA
acccgtgatgctgacaga

SEQ ID NO: 12267 - DNA, 18 bp, synthetic construct
  source 1..18: mol_type = other DNA; mol_type = other DNA
acccgtgatgctgacaaa

SEQ ID NO: 12268 - DNA, 18 bp, synthetic construct
  source 1..18: mol_type = other DNA; mol_type = other DNA
cacccgtgatgctgacag

SEQ ID NO: 12269 - DNA, 18 bp, synthetic construct
  source 1..18: mol_type = other DNA; mol_type = other DNA
cacccgtgatgctgacaa

SEQ ID NO: 12270 - DNA, 18 bp, synthetic construct
  source 1..18: mol_type = other DNA; mol_type = other DNA
ccacccgtgatgctgaca

SEQ ID NO: 12271 - DNA, 18 bp, synthetic construct
  source 1..18: mol_type = other DNA; mol_type = other DNA
ccacccgtgatgctaaca

SEQ ID NO: 12272 - DNA, 18 bp, synthetic construct
  source 1..18: mol_type = other DNA; mol_type = other DNA
gccacccgtgatgctgac

SEQ ID NO: 12273 - DNA, 18 bp, synthetic construct
  source 1..18: mol_type = other DNA; mol_type = other DNA
gccacccgtgatgctaac

SEQ ID NO: 12274 - DNA, 18 bp, synthetic construct
  source 1..18: mol_type = other DNA; mol_type = other DNA
ggccacccgtgatgctga

SEQ ID NO: 12275 - DNA, 18 bp, synthetic construct
  source 1..18: mol_type = other DNA; mol_type = other DNA
ggccacccgtgatgctaa

SEQ ID NO: 12276 - DNA, 18 bp, synthetic construct
  source 1..18: mol_type = other DNA; mol_type = other DNA
cggccacccgtgatgctg

SEQ ID NO: 12277 - DNA, 18 bp, synthetic construct
  source 1..18: mol_type = other DNA; mol_type = other DNA
cggccacccgtgatgcta

SEQ ID NO: 12278 - DNA, 18 bp, synthetic construct
  source 1..18: mol_type = other DNA; mol_type = other DNA
ccggccacccgtgatgct

SEQ ID NO: 12279 - DNA, 18 bp, synthetic construct
  source 1..18: mol_type = other DNA; mol_type = other DNA
ccggccacccgtgatact

SEQ ID NO: 12280 - DNA, 18 bp, synthetic construct
  source 1..18: mol_type = other DNA; mol_type = other DNA
cccggccacccgtgatgc

SEQ ID NO: 12281 - DNA, 18 bp, synthetic construct
  source 1..18: mol_type = other DNA; mol_type = other DNA
cccggccacccgtgatac

SEQ ID NO: 12282 - DNA, 18 bp, synthetic construct
  source 1..18: mol_type = other DNA; mol_type = other DNA
acccggccacccgtgatg

SEQ ID NO: 12283 - DNA, 18 bp, synthetic construct
  source 1..18: mol_type = other DNA; mol_type = other DNA
acccggccacccgtgata

SEQ ID NO: 12284 - DNA, 18 bp, synthetic construct
  source 1..18: mol_type = other DNA; mol_type = other DNA
aacccggccacccgtgat

SEQ ID NO: 12285 - DNA, 18 bp, synthetic construct
  source 1..18: mol_type = other DNA; mol_type = other DNA
aacccggccacccgtaat

SEQ ID NO: 12286 - DNA, 18 bp, synthetic construct
  source 1..18: mol_type = other DNA; mol_type = other DNA
caacccggccacccgtga

SEQ ID NO: 12287 - DNA, 18 bp, synthetic construct
  source 1..18: mol_type = other DNA; mol_type = other DNA
caacccggccacccgtaa

SEQ ID NO: 12288 - DNA, 18 bp, synthetic construct
  source 1..18: mol_type = other DNA; mol_type = other DNA
ccaacccggccacccgtg

SEQ ID NO: 12289 - DNA, 18 bp, synthetic construct
  source 1..18: mol_type = other DNA; mol_type = other DNA
ccaacccggccacccgta

SEQ ID NO: 12290 - DNA, 18 bp, synthetic construct
  source 1..18: mol_type = other DNA; mol_type = other DNA
cccaacccggccacccgt

SEQ ID NO: 12291 - DNA, 18 bp, synthetic construct
  source 1..18: mol_type = other DNA; mol_type = other DNA
cccaacccggccacccat

SEQ ID NO: 12292 - DNA, 18 bp, synthetic construct
  source 1..18: mol_type = other DNA; mol_type = other DNA
ccccaacccggccacccg

SEQ ID NO: 12293 - DNA, 18 bp, synthetic construct
  source 1..18: mol_type = other DNA; mol_type = other DNA
ccccaacccggccaccca

SEQ ID NO: 12294 - DNA, 18 bp, synthetic construct
  source 1..18: mol_type = other DNA; mol_type = other DNA
tccccaacccggccaccc

SEQ ID NO: 12295 - DNA, 18 bp, synthetic construct
  source 1..18: mol_type = other DNA; mol_type = other DNA
tccccaacccgaccaccc

SEQ ID NO: 12296 - DNA, 18 bp, synthetic construct
  source 1..18: mol_type = other DNA; mol_type = other DNA
ctccccaacccggccacc

SEQ ID NO: 12297 - DNA, 18 bp, synthetic construct
  source 1..18: mol_type = other DNA; mol_type = other DNA
ctccccaacccgaccacc

SEQ ID NO: 12298 - DNA, 18 bp, synthetic construct
  source 1..18: mol_type = other DNA; mol_type = other DNA
cctccccaacccggccac

SEQ ID NO: 12299 - DNA, 18 bp, synthetic construct
  source 1..18: mol_type = other DNA; mol_type = other DNA
cctccccaacccgaccac

SEQ ID NO: 12300 - DNA, 18 bp, synthetic construct
  source 1..18: mol_type = other DNA; mol_type = other DNA
tcctccccaacccggcca

SEQ ID NO: 12301 - DNA, 18 bp, synthetic construct
  source 1..18: mol_type = other DNA; mol_type = other DNA
tcctccccaacccgacca

SEQ ID NO: 12302 - DNA, 18 bp, synthetic construct
  source 1..18: mol_type = other DNA; mol_type = other DNA
gtcctccccaacccggcc

SEQ ID NO: 12303 - DNA, 18 bp, synthetic construct
  source 1..18: mol_type = other DNA; mol_type = other DNA
gtcctccccaacccgacc

SEQ ID NO: 12304 - DNA, 18 bp, synthetic construct
  source 1..18: mol_type = other DNA; mol_type = other DNA
tgtcctccccaacccggc

SEQ ID NO: 12305 - DNA, 18 bp, synthetic construct
  source 1..18: mol_type = other DNA; mol_type = other DNA
tgtcctccccaacccgac

SEQ ID NO: 12306 - DNA, 18 bp, synthetic construct
  source 1..18: mol_type = other DNA; mol_type = other DNA
atgtcctccccaacccgg

SEQ ID NO: 12307 - DNA, 18 bp, synthetic construct
  source 1..18: mol_type = other DNA; mol_type = other DNA
atgtcctccccaacccga

SEQ ID NO: 12308 - DNA, 18 bp, synthetic construct
  source 1..18: mol_type = other DNA; mol_type = other DNA
catgtcctccccaacccg

SEQ ID NO: 12309 - DNA, 18 bp, synthetic construct
  source 1..18: mol_type = other DNA; mol_type = other DNA
catgtcctccccaaccca

SEQ ID NO: 12310 - DNA, 18 bp, synthetic construct
  source 1..18: mol_type = other DNA; mol_type = other DNA
ccatgtcctccccaaccc

SEQ ID NO: 12311 - DNA, 18 bp, synthetic construct
  source 1..18: mol_type = other DNA; mol_type = other DNA
ccatatcctccccaaccc

SEQ ID NO: 12312 - DNA, 18 bp, synthetic construct
  source 1..18: mol_type = other DNA; mol_type = other DNA
gccatgtcctccccaacc

SEQ ID NO: 12313 - DNA, 18 bp, synthetic construct
  source 1..18: mol_type = other DNA; mol_type = other DNA
gccatatcctccccaacc

SEQ ID NO: 12314 - DNA, 18 bp, synthetic construct
  source 1..18: mol_type = other DNA; mol_type = other DNA
tgccatgtcctccccaac

SEQ ID NO: 12315 - DNA, 18 bp, synthetic construct
  source 1..18: mol_type = other DNA; mol_type = other DNA
tgccatatcctccccaac

SEQ ID NO: 12316 - DNA, 20 bp, synthetic construct
  source 1..20: mol_type = other DNA; mol_type = other DNA
actgccatgtcctcctcaac

SEQ ID NO: 12317 - DNA, 18 bp, synthetic construct
  source 1..18: mol_type = other DNA; mol_type = other DNA
ctgccatgtcctccccaa

SEQ ID NO: 12318 - DNA, 18 bp, synthetic construct
  source 1..18: mol_type = other DNA; mol_type = other DNA
ctgccatatcctccccaa

SEQ ID NO: 12319 - DNA, 18 bp, synthetic construct
  source 1..18: mol_type = other DNA; mol_type = other DNA
ctgccatgtcctcctcaa

SEQ ID NO: 12320 - DNA, 18 bp, synthetic construct
  source 1..18: mol_type = other DNA; mol_type = other DNA
actgccatgtcctcccca

SEQ ID NO: 12321 - DNA, 18 bp, synthetic construct
  source 1..18: mol_type = other DNA; mol_type = other DNA
actgccatatcctcccca

SEQ ID NO: 12322 - DNA, 18 bp, synthetic construct
  source 1..18: mol_type = other DNA; mol_type = other DNA
cactgccatgtcctcccc

SEQ ID NO: 12323 - DNA, 18 bp, synthetic construct
  source 1..18: mol_type = other DNA; mol_type = other DNA
cactgccatatcctcccc

SEQ ID NO: 12324 - DNA, 18 bp, synthetic construct
  source 1..18: mol_type = other DNA; mol_type = other DNA
ccactgccatgtcctccc

SEQ ID NO: 12325 - DNA, 18 bp, synthetic construct
  source 1..18: mol_type = other DNA; mol_type = other DNA
ccactgccatatcctccc

SEQ ID NO: 12326 - DNA, 18 bp, synthetic construct
  source 1..18: mol_type = other DNA; mol_type = other DNA
cccactgccatgtcctcc

SEQ ID NO: 12327 - DNA, 18 bp, synthetic construct
  source 1..18: mol_type = other DNA; mol_type = other DNA
cccactgccatatcctcc

SEQ ID NO: 12328 - DNA, 18 bp, synthetic construct
  source 1..18: mol_type = other DNA; mol_type = other DNA
ccccactgccatgtcctc

SEQ ID NO: 12329 - DNA, 18 bp, synthetic construct
  source 1..18: mol_type = other DNA; mol_type = other DNA
ccccactgccatatcctc

SEQ ID NO: 12330 - DNA, 18 bp, synthetic construct
  source 1..18: mol_type = other DNA; mol_type = other DNA
gccccactgccatgtcct

SEQ ID NO: 12331 - DNA, 18 bp, synthetic construct
  source 1..18: mol_type = other DNA; mol_type = other DNA
gccccactgccatatcct

SEQ ID NO: 12332 - DNA, 18 bp, synthetic construct
  source 1..18: mol_type = other DNA; mol_type = other DNA
tgccccactgccatgtcc

SEQ ID NO: 12333 - DNA, 18 bp, synthetic construct
  source 1..18: mol_type = other DNA; mol_type = other DNA
tgccccactgccatatcc

SEQ ID NO: 12334 - DNA, 18 bp, synthetic construct
  source 1..18: mol_type = other DNA; mol_type = other DNA
ctgccccactgccatgtc

SEQ ID NO: 12335 - DNA, 18 bp, synthetic construct
  source 1..18: mol_type = other DNA; mol_type = other DNA
ctgccccactgccatatc

SEQ ID NO: 12336 - DNA, 18 bp, synthetic construct
  source 1..18: mol_type = other DNA; mol_type = other DNA
cctgccccactgccatgt

SEQ ID NO: 12337 - DNA, 18 bp, synthetic construct
  source 1..18: mol_type = other DNA; mol_type = other DNA
cctgccccactgccatat

SEQ ID NO: 12338 - DNA, 18 bp, synthetic construct
  source 1..18: mol_type = other DNA; mol_type = other DNA
tcctgccccactgccatg

SEQ ID NO: 12339 - DNA, 18 bp, synthetic construct
  source 1..18: mol_type = other DNA; mol_type = other DNA
tcctgccccactgccata

SEQ ID NO: 12340 - DNA, 18 bp, synthetic construct
  source 1..18: mol_type = other DNA; mol_type = other DNA
ctcctgccccactgccat

SEQ ID NO: 12341 - DNA, 18 bp, synthetic construct
  source 1..18: mol_type = other DNA; mol_type = other DNA
ctcctgccccactaccat

SEQ ID NO: 12342 - DNA, 18 bp, synthetic construct
  source 1..18: mol_type = other DNA; mol_type = other DNA
cctcctgccccactgcca

SEQ ID NO: 12343 - DNA, 18 bp, synthetic construct
  source 1..18: mol_type = other DNA; mol_type = other DNA
cctcctgccccactacca

SEQ ID NO: 12344 - DNA, 18 bp, synthetic construct
  source 1..18: mol_type = other DNA; mol_type = other DNA
acctcctgccccactgcc

SEQ ID NO: 12345 - DNA, 18 bp, synthetic construct
  source 1..18: mol_type = other DNA; mol_type = other DNA
acctcctgccccactacc

SEQ ID NO: 12346 - DNA, 18 bp, synthetic construct
  source 1..18: mol_type = other DNA; mol_type = other DNA
cacctcctgccccactgc

SEQ ID NO: 12347 - DNA, 18 bp, synthetic construct
  source 1..18: mol_type = other DNA; mol_type = other DNA
cacctcctgccccactac

SEQ ID NO: 12348 - DNA, 18 bp, synthetic construct
  source 1..18: mol_type = other DNA; mol_type = other DNA
ccacctcctgccccactg

SEQ ID NO: 12349 - DNA, 18 bp, synthetic construct
  source 1..18: mol_type = other DNA; mol_type = other DNA
ccacctcctgccccacta

SEQ ID NO: 12350 - DNA, 18 bp, synthetic construct
  source 1..18: mol_type = other DNA; mol_type = other DNA
gccacctcctgccccact

SEQ ID NO: 12351 - DNA, 18 bp, synthetic construct
  source 1..18: mol_type = other DNA; mol_type = other DNA
gccacctcctaccccact

SEQ ID NO: 12352 - DNA, 18 bp, synthetic construct
  source 1..18: mol_type = other DNA; mol_type = other DNA
ggccacctcctgccccac

SEQ ID NO: 12353 - DNA, 18 bp, synthetic construct
  source 1..18: mol_type = other DNA; mol_type = other DNA
ggccacctcctaccccac

SEQ ID NO: 12354 - DNA, 18 bp, synthetic construct
  source 1..18: mol_type = other DNA; mol_type = other DNA
gggccacctcctgcccca

SEQ ID NO: 12355 - DNA, 18 bp, synthetic construct
  source 1..18: mol_type = other DNA; mol_type = other DNA
gggccacctcctacccca

SEQ ID NO: 12356 - DNA, 18 bp, synthetic construct
  source 1..18: mol_type = other DNA; mol_type = other DNA
tgggccacctcctgcccc

SEQ ID NO: 12357 - DNA, 18 bp, synthetic construct
  source 1..18: mol_type = other DNA; mol_type = other DNA
tgggccacctcctacccc

SEQ ID NO: 12358 - DNA, 18 bp, synthetic construct
  source 1..18: mol_type = other DNA; mol_type = other DNA
ctgggccacctcctgccc

SEQ ID NO: 12359 - DNA, 18 bp, synthetic construct
  source 1..18: mol_type = other DNA; mol_type = other DNA
ctgggccacctcctaccc

SEQ ID NO: 12360 - DNA, 18 bp, synthetic construct
  source 1..18: mol_type = other DNA; mol_type = other DNA
cctgggccacctcctgcc

SEQ ID NO: 12361 - DNA, 18 bp, synthetic construct
  source 1..18: mol_type = other DNA; mol_type = other DNA
cctgggccacctcctacc

SEQ ID NO: 12362 - DNA, 18 bp, synthetic construct
  source 1..18: mol_type = other DNA; mol_type = other DNA
gcctgggccacctcctgc

SEQ ID NO: 12363 - DNA, 18 bp, synthetic construct
  source 1..18: mol_type = other DNA; mol_type = other DNA
gcctgggccacctcctac

SEQ ID NO: 12364 - DNA, 18 bp, synthetic construct
  source 1..18: mol_type = other DNA; mol_type = other DNA
tgcctgggccacctcctg

SEQ ID NO: 12365 - DNA, 18 bp, synthetic construct
  source 1..18: mol_type = other DNA; mol_type = other DNA
tgcctgggccacctccta

SEQ ID NO: 12366 - DNA, 18 bp, synthetic construct
  source 1..18: mol_type = other DNA; mol_type = other DNA
ctgcctgggccacctcct

SEQ ID NO: 12367 - DNA, 18 bp, synthetic construct
  source 1..18: mol_type = other DNA; mol_type = other DNA
ctgcctggaccacctcct

SEQ ID NO: 12368 - DNA, 18 bp, synthetic construct
  source 1..18: mol_type = other DNA; mol_type = other DNA
gctgcctgggccacctcc

SEQ ID NO: 12369 - DNA, 18 bp, synthetic construct
  source 1..18: mol_type = other DNA; mol_type = other DNA
gctgcctggaccacctcc

SEQ ID NO: 12370 - DNA, 18 bp, synthetic construct
  source 1..18: mol_type = other DNA; mol_type = other DNA
agctgcctgggccacctc

SEQ ID NO: 12371 - DNA, 18 bp, synthetic construct
  source 1..18: mol_type = other DNA; mol_type = other DNA
agctgcctggaccacctc

SEQ ID NO: 12372 - DNA, 18 bp, synthetic construct
  source 1..18: mol_type = other DNA; mol_type = other DNA
cagctgcctgggccacct

SEQ ID NO: 12373 - DNA, 18 bp, synthetic construct
  source 1..18: mol_type = other DNA; mol_type = other DNA
cagctgcctggaccacct

SEQ ID NO: 12374 - DNA, 18 bp, synthetic construct
  source 1..18: mol_type = other DNA; mol_type = other DNA
tcagctgcctgggccacc

SEQ ID NO: 12375 - DNA, 18 bp, synthetic construct
  source 1..18: mol_type = other DNA; mol_type = other DNA
tcagctgcctggaccacc

SEQ ID NO: 12376 - DNA, 18 bp, synthetic construct
  source 1..18: mol_type = other DNA; mol_type = other DNA
ctcagctgcctgggccac

SEQ ID NO: 12377 - DNA, 18 bp, synthetic construct
  source 1..18: mol_type = other DNA; mol_type = other DNA
ctcagctgcctggaccac

SEQ ID NO: 12378 - DNA, 18 bp, synthetic construct
  source 1..18: mol_type = other DNA; mol_type = other DNA
tctcagctgcctgggcca

SEQ ID NO: 12379 - DNA, 18 bp, synthetic construct
  source 1..18: mol_type = other DNA; mol_type = other DNA
tctcagctgcctggacca

SEQ ID NO: 12380 - DNA, 18 bp, synthetic construct
  source 1..18: mol_type = other DNA; mol_type = other DNA
atctcagctgcctgggcc

SEQ ID NO: 12381 - DNA, 18 bp, synthetic construct
  source 1..18: mol_type = other DNA; mol_type = other DNA
atctcagctgcctggacc

SEQ ID NO: 12382 - DNA, 18 bp, synthetic construct
  source 1..18: mol_type = other DNA; mol_type = other DNA
catctcagctgcctgggc

SEQ ID NO: 12383 - DNA, 18 bp, synthetic construct
  source 1..18: mol_type = other DNA; mol_type = other DNA
catctcagctgcctggac

SEQ ID NO: 12384 - DNA, 18 bp, synthetic construct
  source 1..18: mol_type = other DNA; mol_type = other DNA
ccatctcagctgcctggg

SEQ ID NO: 12385 - DNA, 18 bp, synthetic construct
  source 1..18: mol_type = other DNA; mol_type = other DNA
ccatctcagctgcctgga

SEQ ID NO: 12386 - DNA, 18 bp, synthetic construct
  source 1..18: mol_type = other DNA; mol_type = other DNA
tccatctcagctgcctgg

SEQ ID NO: 12387 - DNA, 18 bp, synthetic construct
  source 1..18: mol_type = other DNA; mol_type = other DNA
tccatctcagctgcctga

SEQ ID NO: 12388 - DNA, 18 bp, synthetic construct
  source 1..18: mol_type = other DNA; mol_type = other DNA
ctccatctcagctgcctg

SEQ ID NO: 12389 - DNA, 18 bp, synthetic construct
  source 1..18: mol_type = other DNA; mol_type = other DNA
ctccatctcagctgccta

SEQ ID NO: 12390 - DNA, 18 bp, synthetic construct
  source 1..18: mol_type = other DNA; mol_type = other DNA
gctccatctcagctgcct

SEQ ID NO: 12391 - DNA, 18 bp, synthetic construct
  source 1..18: mol_type = other DNA; mol_type = other DNA
gctccatctcagctacct

SEQ ID NO: 12392 - DNA, 18 bp, synthetic construct
  source 1..18: mol_type = other DNA; mol_type = other DNA
ggctccatctcagctgcc

SEQ ID NO: 12393 - DNA, 18 bp, synthetic construct
  source 1..18: mol_type = other DNA; mol_type = other DNA
ggctccatctcagctacc

SEQ ID NO: 12394 - DNA, 18 bp, synthetic construct
  source 1..18: mol_type = other DNA; mol_type = other DNA
aggctccatctcagctgc

SEQ ID NO: 12395 - DNA, 18 bp, synthetic construct
  source 1..18: mol_type = other DNA; mol_type = other DNA
aggctccatctcagctac

SEQ ID NO: 12396 - DNA, 18 bp, synthetic construct
  source 1..18: mol_type = other DNA; mol_type = other DNA
gaggctccatctcagctg

SEQ ID NO: 12397 - DNA, 18 bp, synthetic construct
  source 1..18: mol_type = other DNA; mol_type = other DNA
gaggctccatctcagcta

SEQ ID NO: 12398 - DNA, 18 bp, synthetic construct
  source 1..18: mol_type = other DNA; mol_type = other DNA
ggaggctccatctcagct

SEQ ID NO: 12399 - DNA, 18 bp, synthetic construct
  source 1..18: mol_type = other DNA; mol_type = other DNA
ggaggctccatctcaact

SEQ ID NO: 12400 - DNA, 18 bp, synthetic construct
  source 1..18: mol_type = other DNA; mol_type = other DNA
aggaggctccatctcagc

SEQ ID NO: 12401 - DNA, 18 bp, synthetic construct
  source 1..18: mol_type = other DNA; mol_type = other DNA
aggaggctccatctcaac

SEQ ID NO: 12402 - DNA, 18 bp, synthetic construct
  source 1..18: mol_type = other DNA; mol_type = other DNA
aaggaggctccatctcag

SEQ ID NO: 12403 - DNA, 18 bp, synthetic construct
  source 1..18: mol_type = other DNA; mol_type = other DNA
aaggaggctccatctcaa

SEQ ID NO: 12404 - DNA, 18 bp, synthetic construct
  source 1..18: mol_type = other DNA; mol_type = other DNA
caaggaggctccatctca

SEQ ID NO: 12405 - DNA, 18 bp, synthetic construct
  source 1..18: mol_type = other DNA; mol_type = other DNA
caaggagactccatctca

SEQ ID NO: 12406 - DNA, 18 bp, synthetic construct
  source 1..18: mol_type = other DNA; mol_type = other DNA
gcaaggaggctccatctc

SEQ ID NO: 12407 - DNA, 18 bp, synthetic construct
  source 1..18: mol_type = other DNA; mol_type = other DNA
gcaaggagactccatctc

SEQ ID NO: 12408 - DNA, 18 bp, synthetic construct
  source 1..18: mol_type = other DNA; mol_type = other DNA
agcaaggaggctccatct

SEQ ID NO: 12409 - DNA, 18 bp, synthetic construct
  source 1..18: mol_type = other DNA; mol_type = other DNA
agcaaggagactccatct

SEQ ID NO: 12410 - DNA, 18 bp, synthetic construct
  source 1..18: mol_type = other DNA; mol_type = other DNA
cagcaaggaggctccatc

SEQ ID NO: 12411 - DNA, 18 bp, synthetic construct
  source 1..18: mol_type = other DNA; mol_type = other DNA
cagcaaggagactccatc

SEQ ID NO: 12412 - DNA, 18 bp, synthetic construct
  source 1..18: mol_type = other DNA; mol_type = other DNA
acagcaaggaggctccat

SEQ ID NO: 12413 - DNA, 18 bp, synthetic construct
  source 1..18: mol_type = other DNA; mol_type = other DNA
acagcaaggagactccat

SEQ ID NO: 12414 - DNA, 18 bp, synthetic construct
  source 1..18: mol_type = other DNA; mol_type = other DNA
cacagcaaggaggctcca

SEQ ID NO: 12415 - DNA, 18 bp, synthetic construct
  source 1..18: mol_type = other DNA; mol_type = other DNA
cacagcaaggagactcca

SEQ ID NO: 12416 - DNA, 18 bp, synthetic construct
  source 1..18: mol_type = other DNA; mol_type = other DNA
gcacagcaaggaggctcc

SEQ ID NO: 12417 - DNA, 18 bp, synthetic construct
  source 1..18: mol_type = other DNA; mol_type = other DNA
gcacagcaaggagactcc

SEQ ID NO: 12418 - DNA, 18 bp, synthetic construct
  source 1..18: mol_type = other DNA; mol_type = other DNA
tgcacagcaaggaggctc

SEQ ID NO: 12419 - DNA, 18 bp, synthetic construct
  source 1..18: mol_type = other DNA; mol_type = other DNA
tgcacagcaaggagactc

SEQ ID NO: 12420 - DNA, 18 bp, synthetic construct
  source 1..18: mol_type = other DNA; mol_type = other DNA
ctgcacagcaaggaggct

SEQ ID NO: 12421 - DNA, 18 bp, synthetic construct
  source 1..18: mol_type = other DNA; mol_type = other DNA
ctgcacagcaaggagact

SEQ ID NO: 12422 - DNA, 18 bp, synthetic construct
  source 1..18: mol_type = other DNA; mol_type = other DNA
tctgcacagcaaggaggc

SEQ ID NO: 12423 - DNA, 18 bp, synthetic construct
  source 1..18: mol_type = other DNA; mol_type = other DNA
tctgcacagcaaggagac

SEQ ID NO: 12424 - DNA, 18 bp, synthetic construct
  source 1..18: mol_type = other DNA; mol_type = other DNA
ctctgcacagcaaggagg

SEQ ID NO: 12425 - DNA, 18 bp, synthetic construct
  source 1..18: mol_type = other DNA; mol_type = other DNA
ctctgcacagcaaggaga

SEQ ID NO: 12426 - DNA, 18 bp, synthetic construct
  source 1..18: mol_type = other DNA; mol_type = other DNA
tctctgcacagcaaggag

SEQ ID NO: 12427 - DNA, 18 bp, synthetic construct
  source 1..18: mol_type = other DNA; mol_type = other DNA
tctctgcacagcaaggaa

SEQ ID NO: 12428 - DNA, 18 bp, synthetic construct
  source 1..18: mol_type = other DNA; mol_type = other DNA
ttctctgcacagcaagga

SEQ ID NO: 12429 - DNA, 18 bp, synthetic construct
  source 1..18: mol_type = other DNA; mol_type = other DNA
ttctctgcacagcaagaa

SEQ ID NO: 12430 - DNA, 18 bp, synthetic construct
  source 1..18: mol_type = other DNA; mol_type = other DNA
cttctctgcacagcaagg

SEQ ID NO: 12431 - DNA, 18 bp, synthetic construct
  source 1..18: mol_type = other DNA; mol_type = other DNA
cttctctgcacagcaaga

SEQ ID NO: 12432 - DNA, 18 bp, synthetic construct
  source 1..18: mol_type = other DNA; mol_type = other DNA
gcttctctgcacagcaag

SEQ ID NO: 12433 - DNA, 18 bp, synthetic construct
  source 1..18: mol_type = other DNA; mol_type = other DNA
gcttctctgcacagcaaa

SEQ ID NO: 12434 - DNA, 18 bp, synthetic construct
  source 1..18: mol_type = other DNA; mol_type = other DNA
agcttctctgcacagcaa

SEQ ID NO: 12435 - DNA, 18 bp, synthetic construct
  source 1..18: mol_type = other DNA; mol_type = other DNA
agcttctctgcacaacaa

SEQ ID NO: 12436 - DNA, 18 bp, synthetic construct
  source 1..18: mol_type = other DNA; mol_type = other DNA
cagcttctctgcacagca

SEQ ID NO: 12437 - DNA, 18 bp, synthetic construct
  source 1..18: mol_type = other DNA; mol_type = other DNA
cagcttctctgcacaaca

SEQ ID NO: 12438 - DNA, 18 bp, synthetic construct
  source 1..18: mol_type = other DNA; mol_type = other DNA
ccagcttctctgcacagc

SEQ ID NO: 12439 - DNA, 18 bp, synthetic construct
  source 1..18: mol_type = other DNA; mol_type = other DNA
ccagcttctctgcacaac

SEQ ID NO: 12440 - DNA, 18 bp, synthetic construct
  source 1..18: mol_type = other DNA; mol_type = other DNA
tccagcttctctgcacag

SEQ ID NO: 12441 - DNA, 18 bp, synthetic construct
  source 1..18: mol_type = other DNA; mol_type = other DNA
tccagcttctctgcacaa

SEQ ID NO: 12442 - DNA, 18 bp, synthetic construct
  source 1..18: mol_type = other DNA; mol_type = other DNA
gtccagcttctctgcaca

SEQ ID NO: 12443 - DNA, 18 bp, synthetic construct
  source 1..18: mol_type = other DNA; mol_type = other DNA
gtccagcttctctacaca

SEQ ID NO: 12444 - DNA, 18 bp, synthetic construct
  source 1..18: mol_type = other DNA; mol_type = other DNA
cgtccagcttctctgcac

SEQ ID NO: 12445 - DNA, 18 bp, synthetic construct
  source 1..18: mol_type = other DNA; mol_type = other DNA
cgtccagcttctctacac

SEQ ID NO: 12446 - DNA, 18 bp, synthetic construct
  source 1..18: mol_type = other DNA; mol_type = other DNA
tcgtccagcttctctgca

SEQ ID NO: 12447 - DNA, 18 bp, synthetic construct
  source 1..18: mol_type = other DNA; mol_type = other DNA
tcgtccagcttctctaca

SEQ ID NO: 12448 - DNA, 18 bp, synthetic construct
  source 1..18: mol_type = other DNA; mol_type = other DNA
ctcgtccagcttctctgc

SEQ ID NO: 12449 - DNA, 18 bp, synthetic construct
  source 1..18: mol_type = other DNA; mol_type = other DNA
ctcgtccagcttctctac

SEQ ID NO: 12450 - DNA, 18 bp, synthetic construct
  source 1..18: mol_type = other DNA; mol_type = other DNA
tctcgtccagcttctctg

SEQ ID NO: 12451 - DNA, 18 bp, synthetic construct
  source 1..18: mol_type = other DNA; mol_type = other DNA
tctcgtccagcttctcta

SEQ ID NO: 12452 - DNA, 18 bp, synthetic construct
  source 1..18: mol_type = other DNA; mol_type = other DNA
atctcgtccagcttctct

SEQ ID NO: 12453 - DNA, 18 bp, synthetic construct
  source 1..18: mol_type = other DNA; mol_type = other DNA
atctcgtccaacttctct

SEQ ID NO: 12454 - DNA, 18 bp, synthetic construct
  source 1..18: mol_type = other DNA; mol_type = other DNA
catctcgtccagcttctc

SEQ ID NO: 12455 - DNA, 18 bp, synthetic construct
  source 1..18: mol_type = other DNA; mol_type = other DNA
catctcgtccaacttctc

SEQ ID NO: 12456 - DNA, 18 bp, synthetic construct
  source 1..18: mol_type = other DNA; mol_type = other DNA
gcatctcgtccagcttct

SEQ ID NO: 12457 - DNA, 18 bp, synthetic construct
  source 1..18: mol_type = other DNA; mol_type = other DNA
gcatctcgtccaacttct

SEQ ID NO: 12458 - DNA, 18 bp, synthetic construct
  source 1..18: mol_type = other DNA; mol_type = other DNA
agcatctcgtccagcttc

SEQ ID NO: 12459 - DNA, 18 bp, synthetic construct
  source 1..18: mol_type = other DNA; mol_type = other DNA
agcatctcgtccaacttc

SEQ ID NO: 12460 - DNA, 18 bp, synthetic construct
  source 1..18: mol_type = other DNA; mol_type = other DNA
cagcatctcgtccagctt

SEQ ID NO: 12461 - DNA, 18 bp, synthetic construct
  source 1..18: mol_type = other DNA; mol_type = other DNA
cagcatctcgtccaactt

SEQ ID NO: 12462 - DNA, 18 bp, synthetic construct
  source 1..18: mol_type = other DNA; mol_type = other DNA
ccagcatctcgtccagct

SEQ ID NO: 12463 - DNA, 18 bp, synthetic construct
  source 1..18: mol_type = other DNA; mol_type = other DNA
ccagcatctcgtccaact

SEQ ID NO: 12464 - DNA, 18 bp, synthetic construct
  source 1..18: mol_type = other DNA; mol_type = other DNA
gccagcatctcgtccagc

SEQ ID NO: 12465 - DNA, 18 bp, synthetic construct
  source 1..18: mol_type = other DNA; mol_type = other DNA
gccagcatctcgtccaac

SEQ ID NO: 12466 - DNA, 18 bp, synthetic construct
  source 1..18: mol_type = other DNA; mol_type = other DNA
tgccagcatctcgtccag

SEQ ID NO: 12467 - DNA, 18 bp, synthetic construct
  source 1..18: mol_type = other DNA; mol_type = other DNA
tgccagcatctcgtccaa

SEQ ID NO: 12468 - DNA, 18 bp, synthetic construct
  source 1..18: mol_type = other DNA; mol_type = other DNA
ctgccagcatctcgtcca

SEQ ID NO: 12469 - DNA, 18 bp, synthetic construct
  source 1..18: mol_type = other DNA; mol_type = other DNA
ctgccagcatctcatcca

SEQ ID NO: 12470 - DNA, 18 bp, synthetic construct
  source 1..18: mol_type = other DNA; mol_type = other DNA
gctgccagcatctcgtcc

SEQ ID NO: 12471 - DNA, 18 bp, synthetic construct
  source 1..18: mol_type = other DNA; mol_type = other DNA
gctgccagcatctcatcc

SEQ ID NO: 12472 - DNA, 18 bp, synthetic construct
  source 1..18: mol_type = other DNA; mol_type = other DNA
ggctgccagcatctcgtc

SEQ ID NO: 12473 - DNA, 18 bp, synthetic construct
  source 1..18: mol_type = other DNA; mol_type = other DNA
ggctgccagcatctcatc

SEQ ID NO: 12474 - DNA, 18 bp, synthetic construct
  source 1..18: mol_type = other DNA; mol_type = other DNA
cggctgccagcatctcgt

SEQ ID NO: 12475 - DNA, 18 bp, synthetic construct
  source 1..18: mol_type = other DNA; mol_type = other DNA
cggctgccagcatctcat

SEQ ID NO: 12476 - DNA, 18 bp, synthetic construct
  source 1..18: mol_type = other DNA; mol_type = other DNA
gcggctgccagcatctcg

SEQ ID NO: 12477 - DNA, 18 bp, synthetic construct
  source 1..18: mol_type = other DNA; mol_type = other DNA
gcggctgccagcatctca

SEQ ID NO: 12478 - DNA, 18 bp, synthetic construct
  source 1..18: mol_type = other DNA; mol_type = other DNA
ggcggctgccagcatctc

SEQ ID NO: 12479 - DNA, 18 bp, synthetic construct
  source 1..18: mol_type = other DNA; mol_type = other DNA
ggcggctgccaacatctc

SEQ ID NO: 12480 - DNA, 18 bp, synthetic construct
  source 1..18: mol_type = other DNA; mol_type = other DNA
cggcggctgccagcatct

SEQ ID NO: 12481 - DNA, 18 bp, synthetic construct
  source 1..18: mol_type = other DNA; mol_type = other DNA
cggcggctgccaacatct

SEQ ID NO: 12482 - DNA, 18 bp, synthetic construct
  source 1..18: mol_type = other DNA; mol_type = other DNA
gcggcggctgccagcatc

SEQ ID NO: 12483 - DNA, 18 bp, synthetic construct
  source 1..18: mol_type = other DNA; mol_type = other DNA
gcggcggctgccaacatc

SEQ ID NO: 12484 - DNA, 18 bp, synthetic construct
  source 1..18: mol_type = other DNA; mol_type = other DNA
tgcggcggctgccagcat

SEQ ID NO: 12485 - DNA, 18 bp, synthetic construct
  source 1..18: mol_type = other DNA; mol_type = other DNA
tgcggcggctgccaacat

SEQ ID NO: 12486 - DNA, 18 bp, synthetic construct
  source 1..18: mol_type = other DNA; mol_type = other DNA
ctgcggcggctgccagca

SEQ ID NO: 12487 - DNA, 18 bp, synthetic construct
  source 1..18: mol_type = other DNA; mol_type = other DNA
ctgcggcggctgccaaca

SEQ ID NO: 12488 - DNA, 18 bp, synthetic construct
  source 1..18: mol_type = other DNA; mol_type = other DNA
tctgcggcggctgccagc

SEQ ID NO: 12489 - DNA, 18 bp, synthetic construct
  source 1..18: mol_type = other DNA; mol_type = other DNA
tctgcggcggctgccaac

SEQ ID NO: 12490 - DNA, 18 bp, synthetic construct
  source 1..18: mol_type = other DNA; mol_type = other DNA
ctctgcggcggctgccag

SEQ ID NO: 12491 - DNA, 18 bp, synthetic construct
  source 1..18: mol_type = other DNA; mol_type = other DNA
ctctgcggcggctgccaa

SEQ ID NO: 12492 - DNA, 18 bp, synthetic construct
  source 1..18: mol_type = other DNA; mol_type = other DNA
gctctgcggcggctgcca

SEQ ID NO: 12493 - DNA, 18 bp, synthetic construct
  source 1..18: mol_type = other DNA; mol_type = other DNA
gctctgcggcggctacca

SEQ ID NO: 12494 - DNA, 18 bp, synthetic construct
  source 1..18: mol_type = other DNA; mol_type = other DNA
ggctctgcggcggctgcc

SEQ ID NO: 12495 - DNA, 18 bp, synthetic construct
  source 1..18: mol_type = other DNA; mol_type = other DNA
ggctctgcggcggctacc

SEQ ID NO: 12496 - DNA, 18 bp, synthetic construct
  source 1..18: mol_type = other DNA; mol_type = other DNA
tggctctgcggcggctgc

SEQ ID NO: 12497 - DNA, 18 bp, synthetic construct
  source 1..18: mol_type = other DNA; mol_type = other DNA
tggctctgcggcggctac

SEQ ID NO: 12498 - DNA, 18 bp, synthetic construct
  source 1..18: mol_type = other DNA; mol_type = other DNA
ttggctctgcggcggctg

SEQ ID NO: 12499 - DNA, 18 bp, synthetic construct
  source 1..18: mol_type = other DNA; mol_type = other DNA
ttggctctgcggcggcta

SEQ ID NO: 12500 - DNA, 18 bp, synthetic construct
  source 1..18: mol_type = other DNA; mol_type = other DNA
gttggctctgcggcggct

SEQ ID NO: 12501 - DNA, 18 bp, synthetic construct
  source 1..18: mol_type = other DNA; mol_type = other DNA
gttggctctgcggcgact

SEQ ID NO: 12502 - DNA, 18 bp, synthetic construct
  source 1..18: mol_type = other DNA; mol_type = other DNA
cgttggctctgcggcggc

SEQ ID NO: 12503 - DNA, 18 bp, synthetic construct
  source 1..18: mol_type = other DNA; mol_type = other DNA
cgttggctctgcggcgac

SEQ ID NO: 12504 - DNA, 18 bp, synthetic construct
  source 1..18: mol_type = other DNA; mol_type = other DNA
gcgttggctctgcggcgg

SEQ ID NO: 12505 - DNA, 18 bp, synthetic construct
  source 1..18: mol_type = other DNA; mol_type = other DNA
gcgttggctctgcggcga

SEQ ID NO: 12506 - DNA, 18 bp, synthetic construct
  source 1..18: mol_type = other DNA; mol_type = other DNA
agcgttggctctgcggcg

SEQ ID NO: 12507 - DNA, 18 bp, synthetic construct
  source 1..18: mol_type = other DNA; mol_type = other DNA
agcgttggctctgcggca

SEQ ID NO: 12508 - DNA, 18 bp, synthetic construct
  source 1..18: mol_type = other DNA; mol_type = other DNA
cagcgttggctctgcggc

SEQ ID NO: 12509 - DNA, 18 bp, synthetic construct
  source 1..18: mol_type = other DNA; mol_type = other DNA
cagcgttggctctgcgac

SEQ ID NO: 12510 - DNA, 18 bp, synthetic construct
  source 1..18: mol_type = other DNA; mol_type = other DNA
gcagcgttggctctgcgg

SEQ ID NO: 12511 - DNA, 18 bp, synthetic construct
  source 1..18: mol_type = other DNA; mol_type = other DNA
gcagcgttggctctgcga

SEQ ID NO: 12512 - DNA, 18 bp, synthetic construct
  source 1..18: mol_type = other DNA; mol_type = other DNA
cgcagcgttggctctgcg

SEQ ID NO: 12513 - DNA, 18 bp, synthetic construct
  source 1..18: mol_type = other DNA; mol_type = other DNA
cgcagcgttggctctgca

SEQ ID NO: 12514 - DNA, 18 bp, synthetic construct
  source 1..18: mol_type = other DNA; mol_type = other DNA
ccgcagcgttggctctgc

SEQ ID NO: 12515 - DNA, 18 bp, synthetic construct
  source 1..18: mol_type = other DNA; mol_type = other DNA
ccgcagcgttggctctac

SEQ ID NO: 12516 - DNA, 18 bp, synthetic construct
  source 1..18: mol_type = other DNA; mol_type = other DNA
gccgcagcgttggctctg

SEQ ID NO: 12517 - DNA, 18 bp, synthetic construct
  source 1..18: mol_type = other DNA; mol_type = other DNA
gccgcagcgttggctcta

SEQ ID NO: 12518 - DNA, 18 bp, synthetic construct
  source 1..18: mol_type = other DNA; mol_type = other DNA
ggccgcagcgttggctct

SEQ ID NO: 12519 - DNA, 18 bp, synthetic construct
  source 1..18: mol_type = other DNA; mol_type = other DNA
ggccgcagcgttgactct

SEQ ID NO: 12520 - DNA, 18 bp, synthetic construct
  source 1..18: mol_type = other DNA; mol_type = other DNA
tggccgcagcgttggctc

SEQ ID NO: 12521 - DNA, 18 bp, synthetic construct
  source 1..18: mol_type = other DNA; mol_type = other DNA
tggccgcagcgttgactc

SEQ ID NO: 12522 - DNA, 18 bp, synthetic construct
  source 1..18: mol_type = other DNA; mol_type = other DNA
ctggccgcagcgttggct

SEQ ID NO: 12523 - DNA, 18 bp, synthetic construct
  source 1..18: mol_type = other DNA; mol_type = other DNA
ctggccgcagcgttgact

SEQ ID NO: 12524 - DNA, 18 bp, synthetic construct
  source 1..18: mol_type = other DNA; mol_type = other DNA
tctggccgcagcgttggc

SEQ ID NO: 12525 - DNA, 18 bp, synthetic construct
  source 1..18: mol_type = other DNA; mol_type = other DNA
tctggccgcagcgttgac

SEQ ID NO: 12526 - DNA, 18 bp, synthetic construct
  source 1..18: mol_type = other DNA; mol_type = other DNA
gtctggccgcagcgttgg

SEQ ID NO: 12527 - DNA, 18 bp, synthetic construct
  source 1..18: mol_type = other DNA; mol_type = other DNA
gtctggccgcagcgttga

SEQ ID NO: 12528 - DNA, 18 bp, synthetic construct
  source 1..18: mol_type = other DNA; mol_type = other DNA
tgtctggccgcagcgttg

SEQ ID NO: 12529 - DNA, 18 bp, synthetic construct
  source 1..18: mol_type = other DNA; mol_type = other DNA
tgtctggccgcagcgtta

SEQ ID NO: 12530 - DNA, 18 bp, synthetic construct
  source 1..18: mol_type = other DNA; mol_type = other DNA
atgtctggccgcagcgtt

SEQ ID NO: 12531 - DNA, 18 bp, synthetic construct
  source 1..18: mol_type = other DNA; mol_type = other DNA
atgtctggccgcagcatt

SEQ ID NO: 12532 - DNA, 18 bp, synthetic construct
  source 1..18: mol_type = other DNA; mol_type = other DNA
gatgtctggccgcagcgt

SEQ ID NO: 12533 - DNA, 18 bp, synthetic construct
  source 1..18: mol_type = other DNA; mol_type = other DNA
gatgtctggccgcagcat

SEQ ID NO: 12534 - DNA, 18 bp, synthetic construct
  source 1..18: mol_type = other DNA; mol_type = other DNA
cgatgtctggccgcagcg

SEQ ID NO: 12535 - DNA, 18 bp, synthetic construct
  source 1..18: mol_type = other DNA; mol_type = other DNA
cgatgtctggccgcagca

SEQ ID NO: 12536 - DNA, 18 bp, synthetic construct
  source 1..18: mol_type = other DNA; mol_type = other DNA
gcgatgtctggccgcagc

SEQ ID NO: 12537 - DNA, 18 bp, synthetic construct
  source 1..18: mol_type = other DNA; mol_type = other DNA
gcgatgtctggccgcaac

SEQ ID NO: 12538 - DNA, 18 bp, synthetic construct
  source 1..18: mol_type = other DNA; mol_type = other DNA
tgcgatgtctggccgcag

SEQ ID NO: 12539 - DNA, 18 bp, synthetic construct
  source 1..18: mol_type = other DNA; mol_type = other DNA
tgcgatgtctggccgcaa

SEQ ID NO: 12540 - DNA, 18 bp, synthetic construct
  source 1..18: mol_type = other DNA; mol_type = other DNA
ctgcgatgtctggccgca

SEQ ID NO: 12541 - DNA, 18 bp, synthetic construct
  source 1..18: mol_type = other DNA; mol_type = other DNA
ctgcgatgtctggccaca

SEQ ID NO: 12542 - DNA, 18 bp, synthetic construct
  source 1..18: mol_type = other DNA; mol_type = other DNA
tctgcgatgtctggccgc

SEQ ID NO: 12543 - DNA, 18 bp, synthetic construct
  source 1..18: mol_type = other DNA; mol_type = other DNA
tctgcgatgtctggccac

SEQ ID NO: 12544 - DNA, 18 bp, synthetic construct
  source 1..18: mol_type = other DNA; mol_type = other DNA
gtctgcgatgtctggccg

SEQ ID NO: 12545 - DNA, 18 bp, synthetic construct
  source 1..18: mol_type = other DNA; mol_type = other DNA
gtctgcgatgtctggcca

SEQ ID NO: 12546 - DNA, 18 bp, synthetic construct
  source 1..18: mol_type = other DNA; mol_type = other DNA
cgtctgcgatgtctggcc

SEQ ID NO: 12547 - DNA, 18 bp, synthetic construct
  source 1..18: mol_type = other DNA; mol_type = other DNA
cgtctgcgatgtctgacc

SEQ ID NO: 12548 - DNA, 18 bp, synthetic construct
  source 1..18: mol_type = other DNA; mol_type = other DNA
gcgtctgcgatgtctggc

SEQ ID NO: 12549 - DNA, 18 bp, synthetic construct
  source 1..18: mol_type = other DNA; mol_type = other DNA
gcgtctgcgatgtctgac

SEQ ID NO: 12550 - DNA, 18 bp, synthetic construct
  source 1..18: mol_type = other DNA; mol_type = other DNA
tgcgtctgcgatgtctgg

SEQ ID NO: 12551 - DNA, 18 bp, synthetic construct
  source 1..18: mol_type = other DNA; mol_type = other DNA
tgcgtctgcgatgtctga

SEQ ID NO: 12552 - DNA, 18 bp, synthetic construct
  source 1..18: mol_type = other DNA; mol_type = other DNA
ctgcgtctgcgatgtctg

SEQ ID NO: 12553 - DNA, 18 bp, synthetic construct
  source 1..18: mol_type = other DNA; mol_type = other DNA
ctgcgtctgcgatgtcta

SEQ ID NO: 12554 - DNA, 18 bp, synthetic construct
  source 1..18: mol_type = other DNA; mol_type = other DNA
tctgcgtctgcgatgtct

SEQ ID NO: 12555 - DNA, 18 bp, synthetic construct
  source 1..18: mol_type = other DNA; mol_type = other DNA
tctgcgtctgcgatatct

SEQ ID NO: 12556 - DNA, 18 bp, synthetic construct
  source 1..18: mol_type = other DNA; mol_type = other DNA
gtctgcgtctgcgatgtc

SEQ ID NO: 12557 - DNA, 18 bp, synthetic construct
  source 1..18: mol_type = other DNA; mol_type = other DNA
gtctgcgtctgcgatatc

SEQ ID NO: 12558 - DNA, 18 bp, synthetic construct
  source 1..18: mol_type = other DNA; mol_type = other DNA
agtctgcgtctgcgatgt

SEQ ID NO: 12559 - DNA, 18 bp, synthetic construct
  source 1..18: mol_type = other DNA; mol_type = other DNA
agtctgcgtctgcgatat

SEQ ID NO: 12560 - DNA, 18 bp, synthetic construct
  source 1..18: mol_type = other DNA; mol_type = other DNA
gagtctgcgtctgcgatg

SEQ ID NO: 12561 - DNA, 18 bp, synthetic construct
  source 1..18: mol_type = other DNA; mol_type = other DNA
gagtctgcgtctgcgata

SEQ ID NO: 12562 - DNA, 18 bp, synthetic construct
  source 1..18: mol_type = other DNA; mol_type = other DNA
ggagtctgcgtctgcgat

SEQ ID NO: 12563 - DNA, 18 bp, synthetic construct
  source 1..18: mol_type = other DNA; mol_type = other DNA
ggagtctgcgtctgcaat

SEQ ID NO: 12564 - DNA, 18 bp, synthetic construct
  source 1..18: mol_type = other DNA; mol_type = other DNA
tggagtctgcgtctgcga

SEQ ID NO: 12565 - DNA, 18 bp, synthetic construct
  source 1..18: mol_type = other DNA; mol_type = other DNA
tggagtctgcgtctgcaa

SEQ ID NO: 12566 - DNA, 18 bp, synthetic construct
  source 1..18: mol_type = other DNA; mol_type = other DNA
ctggagtctgcgtctgcg

SEQ ID NO: 12567 - DNA, 18 bp, synthetic construct
  source 1..18: mol_type = other DNA; mol_type = other DNA
ctggagtctgcgtctgca

SEQ ID NO: 12568 - DNA, 18 bp, synthetic construct
  source 1..18: mol_type = other DNA; mol_type = other DNA
tctggagtctgcgtctgc

SEQ ID NO: 12569 - DNA, 18 bp, synthetic construct
  source 1..18: mol_type = other DNA; mol_type = other DNA
tctggagtctgcgtctac

SEQ ID NO: 12570 - DNA, 18 bp, synthetic construct
  source 1..18: mol_type = other DNA; mol_type = other DNA
ctctggagtctgcgtctg

SEQ ID NO: 12571 - DNA, 18 bp, synthetic construct
  source 1..18: mol_type = other DNA; mol_type = other DNA
ctctggagtctgcgtcta

SEQ ID NO: 12572 - DNA, 18 bp, synthetic construct
  source 1..18: mol_type = other DNA; mol_type = other DNA
gctctggagtctgcgtct

SEQ ID NO: 12573 - DNA, 18 bp, synthetic construct
  source 1..18: mol_type = other DNA; mol_type = other DNA
gctctggagtctgcatct

SEQ ID NO: 12574 - DNA, 18 bp, synthetic construct
  source 1..18: mol_type = other DNA; mol_type = other DNA
ggctctggagtctgcgtc

SEQ ID NO: 12575 - DNA, 18 bp, synthetic construct
  source 1..18: mol_type = other DNA; mol_type = other DNA
ggctctggagtctgcatc

SEQ ID NO: 12576 - DNA, 18 bp, synthetic construct
  source 1..18: mol_type = other DNA; mol_type = other DNA
cggctctggagtctgcgt

SEQ ID NO: 12577 - DNA, 18 bp, synthetic construct
  source 1..18: mol_type = other DNA; mol_type = other DNA
cggctctggagtctgcat

SEQ ID NO: 12578 - DNA, 18 bp, synthetic construct
  source 1..18: mol_type = other DNA; mol_type = other DNA
gcggctctggagtctgcg

SEQ ID NO: 12579 - DNA, 18 bp, synthetic construct
  source 1..18: mol_type = other DNA; mol_type = other DNA
gcggctctggagtctgca

SEQ ID NO: 12580 - DNA, 18 bp, synthetic construct
  source 1..18: mol_type = other DNA; mol_type = other DNA
ggcggctctggagtctgc

SEQ ID NO: 12581 - DNA, 18 bp, synthetic construct
  source 1..18: mol_type = other DNA; mol_type = other DNA
ggcggctctggagtctac

SEQ ID NO: 12582 - DNA, 18 bp, synthetic construct
  source 1..18: mol_type = other DNA; mol_type = other DNA
tggcggctctggagtctg

SEQ ID NO: 12583 - DNA, 18 bp, synthetic construct
  source 1..18: mol_type = other DNA; mol_type = other DNA
tggcggctctggagtcta

SEQ ID NO: 12584 - DNA, 18 bp, synthetic construct
  source 1..18: mol_type = other DNA; mol_type = other DNA
gtggcggctctggagtct

SEQ ID NO: 12585 - DNA, 18 bp, synthetic construct
  source 1..18: mol_type = other DNA; mol_type = other DNA
gtggcggctctggaatct

SEQ ID NO: 12586 - DNA, 18 bp, synthetic construct
  source 1..18: mol_type = other DNA; mol_type = other DNA
ggtggcggctctggagtc

SEQ ID NO: 12587 - DNA, 18 bp, synthetic construct
  source 1..18: mol_type = other DNA; mol_type = other DNA
ggtggcggctctggaatc

SEQ ID NO: 12588 - DNA, 18 bp, synthetic construct
  source 1..18: mol_type = other DNA; mol_type = other DNA
cggtggcggctctggagt

SEQ ID NO: 12589 - DNA, 18 bp, synthetic construct
  source 1..18: mol_type = other DNA; mol_type = other DNA
cggtggcggctctggaat

SEQ ID NO: 12590 - DNA, 18 bp, synthetic construct
  source 1..18: mol_type = other DNA; mol_type = other DNA
acggtggcggctctggag

SEQ ID NO: 12591 - DNA, 18 bp, synthetic construct
  source 1..18: mol_type = other DNA; mol_type = other DNA
acggtggcggctctggaa

SEQ ID NO: 12592 - DNA, 18 bp, synthetic construct
  source 1..18: mol_type = other DNA; mol_type = other DNA
gacggtggcggctctgga

SEQ ID NO: 12593 - DNA, 18 bp, synthetic construct
  source 1..18: mol_type = other DNA; mol_type = other DNA
gacggtggcggctctgaa

SEQ ID NO: 12594 - DNA, 18 bp, synthetic construct
  source 1..18: mol_type = other DNA; mol_type = other DNA
tgacggtggcggctctgg

SEQ ID NO: 12595 - DNA, 18 bp, synthetic construct
  source 1..18: mol_type = other DNA; mol_type = other DNA
tgacggtggcggctctga

SEQ ID NO: 12596 - DNA, 18 bp, synthetic construct
  source 1..18: mol_type = other DNA; mol_type = other DNA
ttgacggtggcggctctg

SEQ ID NO: 12597 - DNA, 18 bp, synthetic construct
  source 1..18: mol_type = other DNA; mol_type = other DNA
ttgacggtggcggctcta

SEQ ID NO: 12598 - DNA, 18 bp, synthetic construct
  source 1..18: mol_type = other DNA; mol_type = other DNA
tttgacggtggcggctct

SEQ ID NO: 12599 - DNA, 18 bp, synthetic construct
  source 1..18: mol_type = other DNA; mol_type = other DNA
tttgacggtggcgactct

SEQ ID NO: 12600 - DNA, 18 bp, synthetic construct
  source 1..18: mol_type = other DNA
gtttgacggtggcggctc

SEQ ID NO: 12601 - DNA, 18 bp, synthetic construct
  source 1..18: mol_type = other DNA
gtttgacggtggcgactc

SEQ ID NO: 12602 - DNA, 18 bp, synthetic construct
  source 1..18: mol_type = other DNA
tgtttgacggtggcggct

SEQ ID NO: 12603 - DNA, 18 bp, synthetic construct
  source 1..18: mol_type = other DNA; mol_type = other DNA
tgtttgacggtggcgact

SEQ ID NO: 12604 - DNA, 18 bp, synthetic construct
  source 1..18: mol_type = other DNA; mol_type = other DNA
ctgtttgacggtggcggc

SEQ ID NO: 12605 - DNA, 18 bp, synthetic construct
  source 1..18: mol_type = other DNA; mol_type = other DNA
ctgtttgacggtggcgac

SEQ ID NO: 12606 - DNA, 18 bp, synthetic construct
  source 1..18: mol_type = other DNA; mol_type = other DNA
tctgtttgacggtggcgg

SEQ ID NO: 12607 - DNA, 18 bp, synthetic construct
  source 1..18: mol_type = other DNA; mol_type = other DNA
tctgtttgacggtggcga

SEQ ID NO: 12608 - DNA, 18 bp, synthetic construct
  source 1..18: mol_type = other DNA; mol_type = other DNA
ctctgtttgacggtggcg

SEQ ID NO: 12609 - DNA, 18 bp, synthetic construct
  source 1..18: mol_type = other DNA; mol_type = other DNA
ctctgtttgacggtggca

SEQ ID NO: 12610 - DNA, 18 bp, synthetic construct
  source 1..18: mol_type = other DNA; mol_type = other DNA
cctctgtttgacggtggc

SEQ ID NO: 12611 - DNA, 18 bp, synthetic construct
  source 1..18: mol_type = other DNA; mol_type = other DNA
cctctgtttgacggtgac

SEQ ID NO: 12612 - DNA, 18 bp, synthetic construct
  source 1..18: mol_type = other DNA; mol_type = other DNA
gcctctgtttgacggtgg

SEQ ID NO: 12613 - DNA, 18 bp, synthetic construct
  source 1..18: mol_type = other DNA; mol_type = other DNA
gcctctgtttgacggtga

SEQ ID NO: 12614 - DNA, 18 bp, synthetic construct
  source 1..18: mol_type = other DNA; mol_type = other DNA
ggcctctgtttgacggtg

SEQ ID NO: 12615 - DNA, 18 bp, synthetic construct
  source 1..18: mol_type = other DNA; mol_type = other DNA
ggcctctgtttgacggta

SEQ ID NO: 12616 - DNA, 18 bp, synthetic construct
  source 1..18: mol_type = other DNA; mol_type = other DNA
gggcctctgtttgacggt

SEQ ID NO: 12617 - DNA, 18 bp, synthetic construct
  source 1..18: mol_type = other DNA; mol_type = other DNA
gggcctctgtttgacgat

SEQ ID NO: 12618 - DNA, 18 bp, synthetic construct
  source 1..18: mol_type = other DNA; mol_type = other DNA
tgggcctctgtttgacgg

SEQ ID NO: 12619 - DNA, 18 bp, synthetic construct
  source 1..18: mol_type = other DNA; mol_type = other DNA
tgggcctctgtttgacga

SEQ ID NO: 12620 - DNA, 18 bp, synthetic construct
  source 1..18: mol_type = other DNA; mol_type = other DNA
gtgggcctctgtttgacg

SEQ ID NO: 12621 - DNA, 18 bp, synthetic construct
  source 1..18: mol_type = other DNA; mol_type = other DNA
gtgggcctctgtttgaca

SEQ ID NO: 12622 - DNA, 18 bp, synthetic construct
  source 1..18: mol_type = other DNA; mol_type = other DNA
ggtgggcctctgtttgac

SEQ ID NO: 12623 - DNA, 18 bp, synthetic construct
  source 1..18: mol_type = other DNA; mol_type = other DNA
ggtgggcctctgtttaac

SEQ ID NO: 12624 - DNA, 18 bp, synthetic construct
  source 1..18: mol_type = other DNA; mol_type = other DNA
tggtgggcctctgtttga

SEQ ID NO: 12625 - DNA, 18 bp, synthetic construct
  source 1..18: mol_type = other DNA; mol_type = other DNA
tggtgggcctctgtttaa

SEQ ID NO: 12626 - DNA, 18 bp, synthetic construct
  source 1..18: mol_type = other DNA; mol_type = other DNA
ctggtgggcctctgtttg

SEQ ID NO: 12627 - DNA, 18 bp, synthetic construct
  source 1..18: mol_type = other DNA; mol_type = other DNA
ctggtgggcctctgttta

SEQ ID NO: 12628 - DNA, 18 bp, synthetic construct
  source 1..18: mol_type = other DNA; mol_type = other DNA
actggtgggcctctgttt

SEQ ID NO: 12629 - DNA, 18 bp, synthetic construct
  source 1..18: mol_type = other DNA; mol_type = other DNA
actggtgggcctctattt

SEQ ID NO: 12630 - DNA, 18 bp, synthetic construct
  source 1..18: mol_type = other DNA; mol_type = other DNA
gactggtgggcctctgtt

SEQ ID NO: 12631 - DNA, 18 bp, synthetic construct
  source 1..18: mol_type = other DNA; mol_type = other DNA
gactggtgggcctctatt

SEQ ID NO: 12632 - DNA, 18 bp, synthetic construct
  source 1..18: mol_type = other DNA; mol_type = other DNA
cgactggtgggcctctgt

SEQ ID NO: 12633 - DNA, 18 bp, synthetic construct
  source 1..18: mol_type = other DNA; mol_type = other DNA
cgactggtgggcctctat

SEQ ID NO: 12634 - DNA, 18 bp, synthetic construct
  source 1..18: mol_type = other DNA; mol_type = other DNA
ccgactggtgggcctctg

SEQ ID NO: 12635 - DNA, 18 bp, synthetic construct
  source 1..18: mol_type = other DNA; mol_type = other DNA
ccgactggtgggcctcta

SEQ ID NO: 12636 - DNA, 18 bp, synthetic construct
  source 1..18: mol_type = other DNA; mol_type = other DNA
tccgactggtgggcctct

SEQ ID NO: 12637 - DNA, 18 bp, synthetic construct
  source 1..18: mol_type = other DNA; mol_type = other DNA
tccgactggtggacctct

SEQ ID NO: 12638 - DNA, 18 bp, synthetic construct
  source 1..18: mol_type = other DNA; mol_type = other DNA
ctccgactggtgggcctc

SEQ ID NO: 12639 - DNA, 18 bp, synthetic construct
  source 1..18: mol_type = other DNA; mol_type = other DNA
ctccgactggtggacctc

SEQ ID NO: 12640 - DNA, 18 bp, synthetic construct
  source 1..18: mol_type = other DNA; mol_type = other DNA
cctccgactggtgggcct

SEQ ID NO: 12641 - DNA, 18 bp, synthetic construct
  source 1..18: mol_type = other DNA; mol_type = other DNA
cctccgactggtggacct

SEQ ID NO: 12642 - DNA, 18 bp, synthetic construct
  source 1..18: mol_type = other DNA; mol_type = other DNA
tcctccgactggtgggcc

SEQ ID NO: 12643 - DNA, 18 bp, synthetic construct
  source 1..18: mol_type = other DNA; mol_type = other DNA
tcctccgactggtggacc

SEQ ID NO: 12644 - DNA, 18 bp, synthetic construct
  source 1..18: mol_type = other DNA; mol_type = other DNA
atcctccgactggtgggc

SEQ ID NO: 12645 - DNA, 18 bp, synthetic construct
  source 1..18: mol_type = other DNA
atcctccgactggtggac

SEQ ID NO: 12646 - DNA, 18 bp, synthetic construct
  source 1..18: mol_type = other DNA
gatcctccgactggtggg

SEQ ID NO: 12647 - DNA, 18 bp, synthetic construct
  source 1..18: mol_type = other DNA
gatcctccgactggtgga

SEQ ID NO: 12648 - DNA, 18 bp, synthetic construct
  source 1..18: mol_type = other DNA; mol_type = other DNA
tgatcctccgactggtgg

SEQ ID NO: 12649 - DNA, 18 bp, synthetic construct
  source 1..18: mol_type = other DNA; mol_type = other DNA
tgatcctccgactggtga

SEQ ID NO: 12650 - DNA, 18 bp, synthetic construct
  source 1..18: mol_type = other DNA; mol_type = other DNA
gtgatcctccgactggtg

SEQ ID NO: 12651 - DNA, 18 bp, synthetic construct
  source 1..18: mol_type = other DNA; mol_type = other DNA
gtgatcctccgactggta

SEQ ID NO: 12652 - DNA, 18 bp, synthetic construct
  source 1..18: mol_type = other DNA; mol_type = other DNA
tgtgatcctccgactggt

SEQ ID NO: 12653 - DNA, 18 bp, synthetic construct
  source 1..18: mol_type = other DNA; mol_type = other DNA
tgtgatcctccgactgat

SEQ ID NO: 12654 - DNA, 18 bp, synthetic construct
  source 1..18: mol_type = other DNA; mol_type = other DNA
gtgtgatcctccgactgg

SEQ ID NO: 12655 - DNA, 18 bp, synthetic construct
  source 1..18: mol_type = other DNA; mol_type = other DNA
gtgtgatcctccgactga

SEQ ID NO: 12656 - DNA, 18 bp, synthetic construct
  source 1..18: mol_type = other DNA; mol_type = other DNA
ggtgtgatcctccgactg

SEQ ID NO: 12657 - DNA, 18 bp, synthetic construct
  source 1..18: mol_type = other DNA; mol_type = other DNA
ggtgtgatcctccgacta

SEQ ID NO: 12658 - DNA, 18 bp, synthetic construct
  source 1..18: mol_type = other DNA; mol_type = other DNA
gggtgtgatcctccgact

SEQ ID NO: 12659 - DNA, 18 bp, synthetic construct
  source 1..18: mol_type = other DNA; mol_type = other DNA
gggtgtgatcctccaact

SEQ ID NO: 12660 - DNA, 18 bp, synthetic construct
  source 1..18: mol_type = other DNA; mol_type = other DNA
cgggtgtgatcctccgac

SEQ ID NO: 12661 - DNA, 18 bp, synthetic construct
  source 1..18: mol_type = other DNA; mol_type = other DNA
cgggtgtgatcctccaac

SEQ ID NO: 12662 - DNA, 18 bp, synthetic construct
  source 1..18: mol_type = other DNA; mol_type = other DNA
gcgggtgtgatcctccga

SEQ ID NO: 12663 - DNA, 18 bp, synthetic construct
  source 1..18: mol_type = other DNA; mol_type = other DNA
gcgggtgtgatcctccaa

SEQ ID NO: 12664 - DNA, 18 bp, synthetic construct
  source 1..18: mol_type = other DNA; mol_type = other DNA
ggcgggtgtgatcctccg

SEQ ID NO: 12665 - DNA, 18 bp, synthetic construct
  source 1..18: mol_type = other DNA; mol_type = other DNA
ggcgggtgtgatcctcca

SEQ ID NO: 12666 - DNA, 18 bp, synthetic construct
  source 1..18: mol_type = other DNA; mol_type = other DNA
cggcgggtgtgatcctcc

SEQ ID NO: 12667 - DNA, 18 bp, synthetic construct
  source 1..18: mol_type = other DNA; mol_type = other DNA
cggcgggtgtaatcctcc

SEQ ID NO: 12668 - DNA, 18 bp, synthetic construct
  source 1..18: mol_type = other DNA; mol_type = other DNA
tcggcgggtgtgatcctc

SEQ ID NO: 12669 - DNA, 18 bp, synthetic construct
  source 1..18: mol_type = other DNA; mol_type = other DNA
tcggcgggtgtaatcctc

SEQ ID NO: 12670 - DNA, 18 bp, synthetic construct
  source 1..18: mol_type = other DNA; mol_type = other DNA
ctcggcgggtgtgatcct

SEQ ID NO: 12671 - DNA, 18 bp, synthetic construct
  source 1..18: mol_type = other DNA; mol_type = other DNA
ctcggcgggtgtaatcct

SEQ ID NO: 12672 - DNA, 18 bp, synthetic construct
  source 1..18: mol_type = other DNA; mol_type = other DNA
tctcggcgggtgtgatcc

SEQ ID NO: 12673 - DNA, 18 bp, synthetic construct
  source 1..18: mol_type = other DNA; mol_type = other DNA
tctcggcgggtgtaatcc

SEQ ID NO: 12674 - DNA, 18 bp, synthetic construct
  source 1..18: mol_type = other DNA; mol_type = other DNA
atctcggcgggtgtgatc

SEQ ID NO: 12675 - DNA, 18 bp, synthetic construct
  source 1..18: mol_type = other DNA; mol_type = other DNA
atctcggcgggtgtaatc

SEQ ID NO: 12676 - DNA, 18 bp, synthetic construct
  source 1..18: mol_type = other DNA; mol_type = other DNA
aatctcggcgggtgtgat

SEQ ID NO: 12677 - DNA, 18 bp, synthetic construct
  source 1..18: mol_type = other DNA; mol_type = other DNA
aatctcggcgggtgtaat

SEQ ID NO: 12678 - DNA, 18 bp, synthetic construct
  source 1..18: mol_type = other DNA; mol_type = other DNA
taatctcggcgggtgtga

SEQ ID NO: 12679 - DNA, 18 bp, synthetic construct
  source 1..18: mol_type = other DNA; mol_type = other DNA
taatctcggcgggtgtaa

SEQ ID NO: 12680 - DNA, 18 bp, synthetic construct
  source 1..18: mol_type = other DNA; mol_type = other DNA
ctaatctcggcgggtgtg

SEQ ID NO: 12681 - DNA, 18 bp, synthetic construct
  source 1..18: mol_type = other DNA; mol_type = other DNA
ctaatctcggcgggtgta

SEQ ID NO: 12682 - DNA, 18 bp, synthetic construct
  source 1..18: mol_type = other DNA; mol_type = other DNA
gctaatctcggcgggtgt

SEQ ID NO: 12683 - DNA, 18 bp, synthetic construct
  source 1..18: mol_type = other DNA; mol_type = other DNA
gctaatctcggcgggtat

SEQ ID NO: 12684 - DNA, 25 bp, synthetic construct
  source 1..25: mol_type = other DNA; mol_type = other DNA
atcagctgcctgggccacctcctgc

SEQ ID NO: 12685 - DNA, 25 bp, synthetic construct
  source 1..25: mol_type = other DNA; mol_type = other DNA
ctaagctgcctgggccacctcctgc

SEQ ID NO: 12686 - DNA, 25 bp, synthetic construct
  source 1..25: mol_type = other DNA; mol_type = other DNA
ctcaactgcctgggccacctcctgc

SEQ ID NO: 12687 - DNA, 25 bp, synthetic construct
  source 1..25: mol_type = other DNA; mol_type = other DNA
ctcagatgcctgggccacctcctgc

SEQ ID NO: 12688 - DNA, 25 bp, synthetic construct
  source 1..25: mol_type = other DNA; mol_type = other DNA
ctcagctacctgggccacctcctgc

SEQ ID NO: 12689 - DNA, 25 bp, synthetic construct
  source 1..25: mol_type = other DNA; mol_type = other DNA
ctcagctgactgggccacctcctgc

SEQ ID NO: 12690 - DNA, 25 bp, synthetic construct
  source 1..25: mol_type = other DNA; mol_type = other DNA
ctcagctgcatgggccacctcctgc

SEQ ID NO: 12691 - DNA, 25 bp, synthetic construct
  source 1..25: mol_type = other DNA; mol_type = other DNA
ctcagctgcctaggccacctcctgc

SEQ ID NO: 12692 - DNA, 25 bp, synthetic construct
  source 1..25: mol_type = other DNA; mol_type = other DNA
ctcagctgcctgagccacctcctgc

SEQ ID NO: 12693 - DNA, 25 bp, synthetic construct
  source 1..25: mol_type = other DNA; mol_type = other DNA
ctcagctgcctggaccacctcctgc

SEQ ID NO: 12694 - DNA, 25 bp, synthetic construct
  source 1..25: mol_type = other DNA; mol_type = other DNA
ctcagctgcctgggacacctcctgc

SEQ ID NO: 12695 - DNA, 25 bp, synthetic construct
  source 1..25: mol_type = other DNA; mol_type = other DNA
ctcagctgcctgggcaacctcctgc

SEQ ID NO: 12696 - DNA, 25 bp, synthetic construct
  source 1..25: mol_type = other DNA; mol_type = other DNA
ctcagctgcctgggccaactcctgc

SEQ ID NO: 12697 - DNA, 25 bp, synthetic construct
  source 1..25: mol_type = other DNA; mol_type = other DNA
ctcagctgcctgggccacatcctgc

SEQ ID NO: 12698 - DNA, 25 bp, synthetic construct
  source 1..25: mol_type = other DNA; mol_type = other DNA
ctcagctgcctgggccacctactgc

SEQ ID NO: 12699 - DNA, 25 bp, synthetic construct
  source 1..25: mol_type = other DNA; mol_type = other DNA
ctcagctgcctgggccacctcatgc

SEQ ID NO: 12700 - DNA, 25 bp, synthetic construct
  source 1..25: mol_type = other DNA; mol_type = other DNA
ctcagctgcctgggccacctcctga

SEQ ID NO: 12701 - DNA, 25 bp, synthetic construct
  source 1..25: mol_type = other DNA
tatcagctgcctgggccacctcctg

SEQ ID NO: 12702 - DNA, 25 bp, synthetic construct
  source 1..25: mol_type = other DNA
tctaagctgcctgggccacctcctg

SEQ ID NO: 12703 - DNA, 25 bp, synthetic construct
  source 1..25: mol_type = other DNA
tctcaactgcctgggccacctcctg

SEQ ID NO: 12704 - DNA, 25 bp, synthetic construct
  source 1..25: mol_type = other DNA
tctcagatgcctgggccacctcctg

SEQ ID NO: 12705 - DNA, 25 bp, synthetic construct
  source 1..25: mol_type = other DNA; mol_type = other DNA
tctcagctacctgggccacctcctg

SEQ ID NO: 12706 - DNA, 25 bp, synthetic construct
  source 1..25: mol_type = other DNA
tctcagctgactgggccacctcctg

SEQ ID NO: 12707 - DNA, 25 bp, synthetic construct
  source 1..25: mol_type = other DNA; mol_type = other DNA
tctcagctgcatgggccacctcctg

SEQ ID NO: 12708 - DNA, 25 bp, synthetic construct
  source 1..25: mol_type = other DNA; mol_type = other DNA
tctcagctgcctaggccacctcctg

SEQ ID NO: 12709 - DNA, 25 bp, synthetic construct
  source 1..25: mol_type = other DNA; mol_type = other DNA
tctcagctgcctgagccacctcctg

SEQ ID NO: 12710 - DNA, 25 bp, synthetic construct
  source 1..25: mol_type = other DNA; mol_type = other DNA
tctcagctgcctggaccacctcctg

SEQ ID NO: 12711 - DNA, 25 bp, synthetic construct
  source 1..25: mol_type = other DNA; mol_type = other DNA
tctcagctgcctgggacacctcctg

SEQ ID NO: 12712 - DNA, 25 bp, synthetic construct
  source 1..25: mol_type = other DNA; mol_type = other DNA
tctcagctgcctgggcaacctcctg

SEQ ID NO: 12713 - DNA, 25 bp, synthetic construct
  source 1..25: mol_type = other DNA; mol_type = other DNA
tctcagctgcctgggccaactcctg

SEQ ID NO: 12714 - DNA, 25 bp, synthetic construct
  source 1..25: mol_type = other DNA; mol_type = other DNA
tctcagctgcctgggccacatcctg

SEQ ID NO: 12715 - DNA, 25 bp, synthetic construct
  source 1..25: mol_type = other DNA; mol_type = other DNA
tctcagctgcctgggccacctactg

SEQ ID NO: 12716 - DNA, 25 bp, synthetic construct
  source 1..25: mol_type = other DNA; mol_type = other DNA
tctcagctgcctgggccacctcatg

SEQ ID NO: 12717 - DNA, 25 bp, synthetic construct
  source 1..25: mol_type = other DNA; mol_type = other DNA
atatcagctgcctgggccacctcct

SEQ ID NO: 12718 - DNA, 25 bp, synthetic construct
  source 1..25: mol_type = other DNA; mol_type = other DNA
atctaagctgcctgggccacctcct

SEQ ID NO: 12719 - DNA, 25 bp, synthetic construct
  source 1..25: mol_type = other DNA; mol_type = other DNA
atctcaactgcctgggccacctcct

SEQ ID NO: 12720 - DNA, 25 bp, synthetic construct
  source 1..25: mol_type = other DNA; mol_type = other DNA
atctcagatgcctgggccacctcct

SEQ ID NO: 12721 - DNA, 25 bp, synthetic construct
  source 1..25: mol_type = other DNA; mol_type = other DNA
atctcagctacctgggccacctcct

SEQ ID NO: 12722 - DNA, 25 bp, synthetic construct
  source 1..25: mol_type = other DNA; mol_type = other DNA
atctcagctgactgggccacctcct

SEQ ID NO: 12723 - DNA, 25 bp, synthetic construct
  source 1..25: mol_type = other DNA; mol_type = other DNA
atctcagctgcatgggccacctcct

SEQ ID NO: 12724 - DNA, 25 bp, synthetic construct
  source 1..25: mol_type = other DNA; mol_type = other DNA
atctcagctgcctaggccacctcct

SEQ ID NO: 12725 - DNA, 25 bp, synthetic construct
  source 1..25: mol_type = other DNA; mol_type = other DNA
atctcagctgcctgagccacctcct

SEQ ID NO: 12726 - DNA, 25 bp, synthetic construct
  source 1..25: mol_type = other DNA; mol_type = other DNA
atctcagctgcctgggacacctcct

SEQ ID NO: 12727 - DNA, 25 bp, synthetic construct
  source 1..25: mol_type = other DNA; mol_type = other DNA
atctcagctgcctgggcaacctcct

SEQ ID NO: 12728 - DNA, 25 bp, synthetic construct
  source 1..25: mol_type = other DNA; mol_type = other DNA
atctcagctgcctgggccaactcct

SEQ ID NO: 12729 - DNA, 25 bp, synthetic construct
  source 1..25: mol_type = other DNA; mol_type = other DNA
atctcagctgcctgggccacatcct

SEQ ID NO: 12730 - DNA, 25 bp, synthetic construct
  source 1..25: mol_type = other DNA; mol_type = other DNA
atctcagctgcctgggccacctact

SEQ ID NO: 12731 - DNA, 25 bp, synthetic construct
  source 1..25: mol_type = other DNA; mol_type = other DNA
atctcagctgcctgggccacctcat

SEQ ID NO: 12732 - DNA, 25 bp, synthetic construct
  source 1..25: mol_type = other DNA; mol_type = other DNA
aatctcagctgcctgggccacctcc

SEQ ID NO: 12733 - DNA, 25 bp, synthetic construct
  source 1..25: mol_type = other DNA; mol_type = other DNA
catatcagctgcctgggccacctcc

SEQ ID NO: 12734 - DNA, 25 bp, synthetic construct
  source 1..25: mol_type = other DNA; mol_type = other DNA
catctaagctgcctgggccacctcc

SEQ ID NO: 12735 - DNA, 25 bp, synthetic construct
  source 1..25: mol_type = other DNA; mol_type = other DNA
catctcaactgcctgggccacctcc

SEQ ID NO: 12736 - DNA, 25 bp, synthetic construct
  source 1..25: mol_type = other DNA; mol_type = other DNA
catctcagatgcctgggccacctcc

SEQ ID NO: 12737 - DNA, 25 bp, synthetic construct
  source 1..25: mol_type = other DNA; mol_type = other DNA
catctcagctacctgggccacctcc

SEQ ID NO: 12738 - DNA, 25 bp, synthetic construct
  source 1..25: mol_type = other DNA; mol_type = other DNA
catctcagctgactgggccacctcc

SEQ ID NO: 12739 - DNA, 25 bp, synthetic construct
  source 1..25: mol_type = other DNA; mol_type = other DNA
catctcagctgcatgggccacctcc

SEQ ID NO: 12740 - DNA, 25 bp, synthetic construct
  source 1..25: mol_type = other DNA; mol_type = other DNA
catctcagctgcctaggccacctcc

SEQ ID NO: 12741 - DNA, 25 bp, synthetic construct
  source 1..25: mol_type = other DNA; mol_type = other DNA
catctcagctgcctgagccacctcc

SEQ ID NO: 12742 - DNA, 25 bp, synthetic construct
  source 1..25: mol_type = other DNA; mol_type = other DNA
catctcagctgcctgggacacctcc

SEQ ID NO: 12743 - DNA, 25 bp, synthetic construct
  source 1..25: mol_type = other DNA; mol_type = other DNA
catctcagctgcctgggcaacctcc

SEQ ID NO: 12744 - DNA, 25 bp, synthetic construct
  source 1..25: mol_type = other DNA; mol_type = other DNA
catctcagctgcctgggccaactcc

SEQ ID NO: 12745 - DNA, 25 bp, synthetic construct
  source 1..25: mol_type = other DNA; mol_type = other DNA
catctcagctgcctgggccacatcc

SEQ ID NO: 12746 - DNA, 25 bp, synthetic construct
  source 1..25: mol_type = other DNA; mol_type = other DNA
catctcagctgcctgggccacctac

SEQ ID NO: 12747 - DNA, 25 bp, synthetic construct
  source 1..25: mol_type = other DNA; mol_type = other DNA
catctcagctgcctgggccacctca

SEQ ID NO: 12748 - DNA, 25 bp, synthetic construct
  source 1..25: mol_type = other DNA; mol_type = other DNA
acatctcagctgcctgggccacctc

SEQ ID NO: 12749 - DNA, 25 bp, synthetic construct
  source 1..25: mol_type = other DNA; mol_type = other DNA
caatctcagctgcctgggccacctc

SEQ ID NO: 12750 - DNA, 25 bp, synthetic construct
  source 1..25: mol_type = other DNA; mol_type = other DNA
ccatatcagctgcctgggccacctc

SEQ ID NO: 12751 - DNA, 25 bp, synthetic construct
  source 1..25: mol_type = other DNA; mol_type = other DNA
ccatctaagctgcctgggccacctc

SEQ ID NO: 12752 - DNA, 25 bp, synthetic construct
  source 1..25: mol_type = other DNA; mol_type = other DNA
ccatctcaactgcctgggccacctc

SEQ ID NO: 12753 - DNA, 25 bp, synthetic construct
  source 1..25: mol_type = other DNA; mol_type = other DNA
ccatctcagatgcctgggccacctc

SEQ ID NO: 12754 - DNA, 25 bp, synthetic construct
  source 1..25: mol_type = other DNA; mol_type = other DNA
ccatctcagctacctgggccacctc

SEQ ID NO: 12755 - DNA, 25 bp, synthetic construct
  source 1..25: mol_type = other DNA; mol_type = other DNA
ccatctcagctgactgggccacctc

SEQ ID NO: 12756 - DNA, 25 bp, synthetic construct
  source 1..25: mol_type = other DNA; mol_type = other DNA
ccatctcagctgcatgggccacctc

SEQ ID NO: 12757 - DNA, 25 bp, synthetic construct
  source 1..25: mol_type = other DNA; mol_type = other DNA
ccatctcagctgcctaggccacctc

SEQ ID NO: 12758 - DNA, 25 bp, synthetic construct
  source 1..25: mol_type = other DNA; mol_type = other DNA
ccatctcagctgcctgagccacctc

SEQ ID NO: 12759 - DNA, 25 bp, synthetic construct
  source 1..25: mol_type = other DNA; mol_type = other DNA
ccatctcagctgcctgggacacctc

SEQ ID NO: 12760 - DNA, 25 bp, synthetic construct
  source 1..25: mol_type = other DNA; mol_type = other DNA
ccatctcagctgcctgggcaacctc

SEQ ID NO: 12761 - DNA, 25 bp, synthetic construct
  source 1..25: mol_type = other DNA; mol_type = other DNA
ccatctcagctgcctgggccaactc

SEQ ID NO: 12762 - DNA, 25 bp, synthetic construct
  source 1..25: mol_type = other DNA; mol_type = other DNA
ccatctcagctgcctgggccacatc

SEQ ID NO: 12763 - DNA, 25 bp, synthetic construct
  source 1..25: mol_type = other DNA; mol_type = other DNA
ccatctcagctgcctgggccaccta

SEQ ID NO: 12764 - DNA, 25 bp, synthetic construct
  source 1..25: mol_type = other DNA; mol_type = other DNA
tacatctcagctgcctgggccacct

SEQ ID NO: 12765 - DNA, 25 bp, synthetic construct
  source 1..25: mol_type = other DNA; mol_type = other DNA
tcaatctcagctgcctgggccacct

SEQ ID NO: 12766 - DNA, 25 bp, synthetic construct
  source 1..25: mol_type = other DNA; mol_type = other DNA
tccatatcagctgcctgggccacct

SEQ ID NO: 12767 - DNA, 25 bp, synthetic construct
  source 1..25: mol_type = other DNA; mol_type = other DNA
tccatctaagctgcctgggccacct

SEQ ID NO: 12768 - DNA, 25 bp, synthetic construct
  source 1..25: mol_type = other DNA; mol_type = other DNA
tccatctcaactgcctgggccacct

SEQ ID NO: 12769 - DNA, 25 bp, synthetic construct
  source 1..25: mol_type = other DNA; mol_type = other DNA
tccatctcagatgcctgggccacct

SEQ ID NO: 12770 - DNA, 25 bp, synthetic construct
  source 1..25: mol_type = other DNA; mol_type = other DNA
tccatctcagctacctgggccacct

SEQ ID NO: 12771 - DNA, 25 bp, synthetic construct
  source 1..25: mol_type = other DNA; mol_type = other DNA
tccatctcagctgactgggccacct

SEQ ID NO: 12772 - DNA, 25 bp, synthetic construct
  source 1..25: mol_type = other DNA; mol_type = other DNA
tccatctcagctgcatgggccacct

SEQ ID NO: 12773 - DNA, 25 bp, synthetic construct
  source 1..25: mol_type = other DNA; mol_type = other DNA
tccatctcagctgcctaggccacct

SEQ ID NO: 12774 - DNA, 25 bp, synthetic construct
  source 1..25: mol_type = other DNA; mol_type = other DNA
tccatctcagctgcctgagccacct

SEQ ID NO: 12775 - DNA, 25 bp, synthetic construct
  source 1..25: mol_type = other DNA; mol_type = other DNA
tccatctcagctgcctgggacacct

SEQ ID NO: 12776 - DNA, 25 bp, synthetic construct
  source 1..25: mol_type = other DNA; mol_type = other DNA
tccatctcagctgcctgggcaacct

SEQ ID NO: 12777 - DNA, 25 bp, synthetic construct
  source 1..25: mol_type = other DNA; mol_type = other DNA
tccatctcagctgcctgggccaact

SEQ ID NO: 12778 - DNA, 25 bp, synthetic construct
  source 1..25: mol_type = other DNA; mol_type = other DNA
tccatctcagctgcctgggccacat

SEQ ID NO: 12779 - DNA, 25 bp, synthetic construct
  source 1..25: mol_type = other DNA; mol_type = other DNA
atccatctcagctgcctgggccacc

SEQ ID NO: 12780 - DNA, 25 bp, synthetic construct
  source 1..25: mol_type = other DNA; mol_type = other DNA
ctacatctcagctgcctgggccacc

SEQ ID NO: 12781 - DNA, 25 bp, synthetic construct
  source 1..25: mol_type = other DNA; mol_type = other DNA
ctcaatctcagctgcctgggccacc

SEQ ID NO: 12782 - DNA, 25 bp, synthetic construct
  source 1..25: mol_type = other DNA; mol_type = other DNA
ctccatatcagctgcctgggccacc

SEQ ID NO: 12783 - DNA, 25 bp, synthetic construct
  source 1..25: mol_type = other DNA; mol_type = other DNA
ctccatctaagctgcctgggccacc

SEQ ID NO: 12784 - DNA, 25 bp, synthetic construct
  source 1..25: mol_type = other DNA; mol_type = other DNA
ctccatctcaactgcctgggccacc

SEQ ID NO: 12785 - DNA, 25 bp, synthetic construct
  source 1..25: mol_type = other DNA; mol_type = other DNA
ctccatctcagatgcctgggccacc

SEQ ID NO: 12786 - DNA, 25 bp, synthetic construct
  source 1..25: mol_type = other DNA; mol_type = other DNA
ctccatctcagctacctgggccacc

SEQ ID NO: 12787 - DNA, 25 bp, synthetic construct
  source 1..25: mol_type = other DNA; mol_type = other DNA
ctccatctcagctgactgggccacc

SEQ ID NO: 12788 - DNA, 25 bp, synthetic construct
  source 1..25: mol_type = other DNA; mol_type = other DNA
ctccatctcagctgcatgggccacc

SEQ ID NO: 12789 - DNA, 25 bp, synthetic construct
  source 1..25: mol_type = other DNA; mol_type = other DNA
ctccatctcagctgcctaggccacc

SEQ ID NO: 12790 - DNA, 25 bp, synthetic construct
  source 1..25: mol_type = other DNA; mol_type = other DNA
ctccatctcagctgcctgagccacc

SEQ ID NO: 12791 - DNA, 25 bp, synthetic construct
  source 1..25: mol_type = other DNA; mol_type = other DNA
ctccatctcagctgcctgggacacc

SEQ ID NO: 12792 - DNA, 25 bp, synthetic construct
  source 1..25: mol_type = other DNA; mol_type = other DNA
ctccatctcagctgcctgggcaacc

SEQ ID NO: 12793 - DNA, 25 bp, synthetic construct
  source 1..25: mol_type = other DNA; mol_type = other DNA
ctccatctcagctgcctgggccaac

SEQ ID NO: 12794 - DNA, 25 bp, synthetic construct
  source 1..25: mol_type = other DNA; mol_type = other DNA
ctccatctcagctgcctgggccaca

SEQ ID NO: 12795 - DNA, 25 bp, synthetic construct
  source 1..25: mol_type = other DNA; mol_type = other DNA
actccatctcagctgcctgggccac

SEQ ID NO: 12796 - DNA, 25 bp, synthetic construct
  source 1..25: mol_type = other DNA; mol_type = other DNA
gatccatctcagctgcctgggccac

SEQ ID NO: 12797 - DNA, 25 bp, synthetic construct
  source 1..25: mol_type = other DNA; mol_type = other DNA
gctacatctcagctgcctgggccac

SEQ ID NO: 12798 - DNA, 25 bp, synthetic construct
  source 1..25: mol_type = other DNA; mol_type = other DNA
gctcaatctcagctgcctgggccac

SEQ ID NO: 12799 - DNA, 25 bp, synthetic construct
  source 1..25: mol_type = other DNA; mol_type = other DNA
gctccatatcagctgcctgggccac

SEQ ID NO: 12800 - DNA, 25 bp, synthetic construct
  source 1..25: mol_type = other DNA; mol_type = other DNA
gctccatctaagctgcctgggccac

SEQ ID NO: 12801 - DNA, 25 bp, synthetic construct
  source 1..25: mol_type = other DNA; mol_type = other DNA
gctccatctcaactgcctgggccac

SEQ ID NO: 12802 - DNA, 25 bp, synthetic construct
  source 1..25: mol_type = other DNA; mol_type = other DNA
gctccatctcagatgcctgggccac

SEQ ID NO: 12803 - DNA, 25 bp, synthetic construct
  source 1..25: mol_type = other DNA; mol_type = other DNA
gctccatctcagctacctgggccac

SEQ ID NO: 12804 - DNA, 25 bp, synthetic construct
  source 1..25: mol_type = other DNA; mol_type = other DNA
gctccatctcagctgactgggccac

SEQ ID NO: 12805 - DNA, 25 bp, synthetic construct
  source 1..25: mol_type = other DNA; mol_type = other DNA
gctccatctcagctgcatgggccac

SEQ ID NO: 12806 - DNA, 25 bp, synthetic construct
  source 1..25: mol_type = other DNA; mol_type = other DNA
gctccatctcagctgcctaggccac

SEQ ID NO: 12807 - DNA, 25 bp, synthetic construct
  source 1..25: mol_type = other DNA; mol_type = other DNA
gctccatctcagctgcctgagccac

SEQ ID NO: 12808 - DNA, 25 bp, synthetic construct
  source 1..25: mol_type = other DNA; mol_type = other DNA
gctccatctcagctgcctgggacac

SEQ ID NO: 12809 - DNA, 25 bp, synthetic construct
  source 1..25: mol_type = other DNA; mol_type = other DNA
gctccatctcagctgcctgggcaac

SEQ ID NO: 12810 - DNA, 25 bp, synthetic construct
  source 1..25: mol_type = other DNA; mol_type = other DNA
gctccatctcagctgcctgggccaa

SEQ ID NO: 12811 - DNA, 25 bp, synthetic construct
  source 1..25: mol_type = other DNA; mol_type = other DNA
agctccatctcagctgcctgggcca

SEQ ID NO: 12812 - DNA, 25 bp, synthetic construct
  source 1..25: mol_type = other DNA; mol_type = other DNA
gactccatctcagctgcctgggcca

SEQ ID NO: 12813 - DNA, 25 bp, synthetic construct
  source 1..25: mol_type = other DNA; mol_type = other DNA
ggatccatctcagctgcctgggcca

SEQ ID NO: 12814 - DNA, 25 bp, synthetic construct
  source 1..25: mol_type = other DNA; mol_type = other DNA
ggctacatctcagctgcctgggcca

SEQ ID NO: 12815 - DNA, 25 bp, synthetic construct
  source 1..25: mol_type = other DNA; mol_type = other DNA
ggctcaatctcagctgcctgggcca

SEQ ID NO: 12816 - DNA, 25 bp, synthetic construct
  source 1..25: mol_type = other DNA; mol_type = other DNA
ggctccatatcagctgcctgggcca

SEQ ID NO: 12817 - DNA, 25 bp, synthetic construct
  source 1..25: mol_type = other DNA; mol_type = other DNA
ggctccatctaagctgcctgggcca

SEQ ID NO: 12818 - DNA, 25 bp, synthetic construct
  source 1..25: mol_type = other DNA; mol_type = other DNA
ggctccatctcaactgcctgggcca

SEQ ID NO: 12819 - DNA, 25 bp, synthetic construct
  source 1..25: mol_type = other DNA; mol_type = other DNA
ggctccatctcagatgcctgggcca

SEQ ID NO: 12820 - DNA, 25 bp, synthetic construct
  source 1..25: mol_type = other DNA; mol_type = other DNA
ggctccatctcagctacctgggcca

SEQ ID NO: 12821 - DNA, 25 bp, synthetic construct
  source 1..25: mol_type = other DNA; mol_type = other DNA
ggctccatctcagctgactgggcca

SEQ ID NO: 12822 - DNA, 25 bp, synthetic construct
  source 1..25: mol_type = other DNA; mol_type = other DNA
ggctccatctcagctgcatgggcca

SEQ ID NO: 12823 - DNA, 25 bp, synthetic construct
  source 1..25: mol_type = other DNA; mol_type = other DNA
ggctccatctcagctgcctaggcca

SEQ ID NO: 12824 - DNA, 25 bp, synthetic construct
  source 1..25: mol_type = other DNA; mol_type = other DNA
ggctccatctcagctgcctgagcca

SEQ ID NO: 12825 - DNA, 25 bp, synthetic construct
  source 1..25: mol_type = other DNA; mol_type = other DNA
ggctccatctcagctgcctgggaca

SEQ ID NO: 12826 - DNA, 25 bp, synthetic construct
  source 1..25: mol_type = other DNA; mol_type = other DNA
ggctccatctcagctgcctgggcaa

SEQ ID NO: 12827 - DNA, 25 bp, synthetic construct
  source 1..25: mol_type = other DNA; mol_type = other DNA
aagctccatctcagctgcctgggcc

SEQ ID NO: 12828 - DNA, 25 bp, synthetic construct
  source 1..25: mol_type = other DNA; mol_type = other DNA
agactccatctcagctgcctgggcc

SEQ ID NO: 12829 - DNA, 25 bp, synthetic construct
  source 1..25: mol_type = other DNA; mol_type = other DNA
aggatccatctcagctgcctgggcc

SEQ ID NO: 12830 - DNA, 25 bp, synthetic construct
  source 1..25: mol_type = other DNA; mol_type = other DNA
aggctacatctcagctgcctgggcc

SEQ ID NO: 12831 - DNA, 25 bp, synthetic construct
  source 1..25: mol_type = other DNA; mol_type = other DNA
aggctcaatctcagctgcctgggcc

SEQ ID NO: 12832 - DNA, 25 bp, synthetic construct
  source 1..25: mol_type = other DNA; mol_type = other DNA
aggctccatatcagctgcctgggcc

SEQ ID NO: 12833 - DNA, 25 bp, synthetic construct
  source 1..25: mol_type = other DNA; mol_type = other DNA
aggctccatctaagctgcctgggcc

SEQ ID NO: 12834 - DNA, 25 bp, synthetic construct
  source 1..25: mol_type = other DNA; mol_type = other DNA
aggctccatctcaactgcctgggcc

SEQ ID NO: 12835 - DNA, 25 bp, synthetic construct
  source 1..25: mol_type = other DNA; mol_type = other DNA
aggctccatctcagatgcctgggcc

SEQ ID NO: 12836 - DNA, 25 bp, synthetic construct
  source 1..25: mol_type = other DNA; mol_type = other DNA
aggctccatctcagctacctgggcc

SEQ ID NO: 12837 - DNA, 25 bp, synthetic construct
  source 1..25: mol_type = other DNA; mol_type = other DNA
aggctccatctcagctgactgggcc

SEQ ID NO: 12838 - DNA, 25 bp, synthetic construct
  source 1..25: mol_type = other DNA; mol_type = other DNA
aggctccatctcagctgcatgggcc

SEQ ID NO: 12839 - DNA, 25 bp, synthetic construct
  source 1..25: mol_type = other DNA; mol_type = other DNA
aggctccatctcagctgcctaggcc

SEQ ID NO: 12840 - DNA, 25 bp, synthetic construct
  source 1..25: mol_type = other DNA; mol_type = other DNA
aggctccatctcagctgcctgagcc

SEQ ID NO: 12841 - DNA, 25 bp, synthetic construct
  source 1..25: mol_type = other DNA; mol_type = other DNA
aggctccatctcagctgcctgggac

SEQ ID NO: 12842 - DNA, 25 bp, synthetic construct
  source 1..25: mol_type = other DNA; mol_type = other DNA
aggctccatctcagctgcctgggca

SEQ ID NO: 12843 - DNA, 25 bp, synthetic construct
  source 1..25: mol_type = other DNA; mol_type = other DNA
aaggctccatctcagctgcctgggc

SEQ ID NO: 12844 - DNA, 25 bp, synthetic construct
  source 1..25: mol_type = other DNA; mol_type = other DNA
gaagctccatctcagctgcctgggc

SEQ ID NO: 12845 - DNA, 25 bp, synthetic construct
  source 1..25: mol_type = other DNA; mol_type = other DNA
gagactccatctcagctgcctgggc

SEQ ID NO: 12846 - DNA, 25 bp, synthetic construct
  source 1..25: mol_type = other DNA; mol_type = other DNA
gaggatccatctcagctgcctgggc

SEQ ID NO: 12847 - DNA, 25 bp, synthetic construct
  source 1..25: mol_type = other DNA; mol_type = other DNA
gaggctacatctcagctgcctgggc

SEQ ID NO: 12848 - DNA, 25 bp, synthetic construct
  source 1..25: mol_type = other DNA; mol_type = other DNA
gaggctcaatctcagctgcctgggc

SEQ ID NO: 12849 - DNA, 25 bp, synthetic construct
  source 1..25: mol_type = other DNA; mol_type = other DNA
gaggctccatatcagctgcctgggc

SEQ ID NO: 12850 - DNA, 25 bp, synthetic construct
  source 1..25: mol_type = other DNA; mol_type = other DNA
gaggctccatctaagctgcctgggc

SEQ ID NO: 12851 - DNA, 25 bp, synthetic construct
  source 1..25: mol_type = other DNA; mol_type = other DNA
gaggctccatctcaactgcctgggc

SEQ ID NO: 12852 - DNA, 25 bp, synthetic construct
  source 1..25: mol_type = other DNA; mol_type = other DNA
gaggctccatctcagatgcctgggc

SEQ ID NO: 12853 - DNA, 25 bp, synthetic construct
  source 1..25: mol_type = other DNA; mol_type = other DNA
gaggctccatctcagctacctgggc

SEQ ID NO: 12854 - DNA, 25 bp, synthetic construct
  source 1..25: mol_type = other DNA; mol_type = other DNA
gaggctccatctcagctgactgggc

SEQ ID NO: 12855 - DNA, 25 bp, synthetic construct
  source 1..25: mol_type = other DNA; mol_type = other DNA
gaggctccatctcagctgcatgggc

SEQ ID NO: 12856 - DNA, 25 bp, synthetic construct
  source 1..25: mol_type = other DNA; mol_type = other DNA
gaggctccatctcagctgcctaggc

SEQ ID NO: 12857 - DNA, 25 bp, synthetic construct
  source 1..25: mol_type = other DNA; mol_type = other DNA
gaggctccatctcagctgcctgagc

SEQ ID NO: 12858 - DNA, 25 bp, synthetic construct
  source 1..25: mol_type = other DNA; mol_type = other DNA
gaggctccatctcagctgcctggga

SEQ ID NO: 12859 - DNA, 25 bp, synthetic construct
  source 1..25: mol_type = other DNA; mol_type = other DNA
agaggctccatctcagctgcctggg

SEQ ID NO: 12860 - DNA, 25 bp, synthetic construct
  source 1..25: mol_type = other DNA; mol_type = other DNA
gaaggctccatctcagctgcctggg

SEQ ID NO: 12861 - DNA, 25 bp, synthetic construct
  source 1..25: mol_type = other DNA; mol_type = other DNA
ggaagctccatctcagctgcctggg

SEQ ID NO: 12862 - DNA, 25 bp, synthetic construct
  source 1..25: mol_type = other DNA; mol_type = other DNA
ggagactccatctcagctgcctggg

SEQ ID NO: 12863 - DNA, 25 bp, synthetic construct
  source 1..25: mol_type = other DNA; mol_type = other DNA
ggaggatccatctcagctgcctggg

SEQ ID NO: 12864 - DNA, 25 bp, synthetic construct
  source 1..25: mol_type = other DNA; mol_type = other DNA
ggaggctacatctcagctgcctggg

SEQ ID NO: 12865 - DNA, 25 bp, synthetic construct
  source 1..25: mol_type = other DNA; mol_type = other DNA
ggaggctcaatctcagctgcctggg

SEQ ID NO: 12866 - DNA, 25 bp, synthetic construct
  source 1..25: mol_type = other DNA; mol_type = other DNA
ggaggctccatatcagctgcctggg

SEQ ID NO: 12867 - DNA, 25 bp, synthetic construct
  source 1..25: mol_type = other DNA; mol_type = other DNA
ggaggctccatctaagctgcctggg

SEQ ID NO: 12868 - DNA, 25 bp, synthetic construct
  source 1..25: mol_type = other DNA; mol_type = other DNA
ggaggctccatctcaactgcctggg

SEQ ID NO: 12869 - DNA, 25 bp, synthetic construct
  source 1..25: mol_type = other DNA; mol_type = other DNA
ggaggctccatctcagatgcctggg

SEQ ID NO: 12870 - DNA, 25 bp, synthetic construct
  source 1..25: mol_type = other DNA; mol_type = other DNA
ggaggctccatctcagctacctggg

SEQ ID NO: 12871 - DNA, 25 bp, synthetic construct
  source 1..25: mol_type = other DNA; mol_type = other DNA
ggaggctccatctcagctgactggg

SEQ ID NO: 12872 - DNA, 25 bp, synthetic construct
  source 1..25: mol_type = other DNA; mol_type = other DNA
ggaggctccatctcagctgcatggg

SEQ ID NO: 12873 - DNA, 25 bp, synthetic construct
  source 1..25: mol_type = other DNA; mol_type = other DNA
ggaggctccatctcagctgcctagg

SEQ ID NO: 12874 - DNA, 25 bp, synthetic construct
  source 1..25: mol_type = other DNA; mol_type = other DNA
ggaggctccatctcagctgcctgag

SEQ ID NO: 12875 - DNA, 25 bp, synthetic construct
  source 1..25: mol_type = other DNA; mol_type = other DNA
aagaggctccatctcagctgcctgg

SEQ ID NO: 12876 - DNA, 25 bp, synthetic construct
  source 1..25: mol_type = other DNA; mol_type = other DNA
agaaggctccatctcagctgcctgg

SEQ ID NO: 12877 - DNA, 25 bp, synthetic construct
  source 1..25: mol_type = other DNA; mol_type = other DNA
aggaagctccatctcagctgcctgg

SEQ ID NO: 12878 - DNA, 25 bp, synthetic construct
  source 1..25: mol_type = other DNA; mol_type = other DNA
aggagactccatctcagctgcctgg

SEQ ID NO: 12879 - DNA, 25 bp, synthetic construct
  source 1..25: mol_type = other DNA; mol_type = other DNA
aggaggatccatctcagctgcctgg

SEQ ID NO: 12880 - DNA, 25 bp, synthetic construct
  source 1..25: mol_type = other DNA; mol_type = other DNA
aggaggctacatctcagctgcctgg

SEQ ID NO: 12881 - DNA, 25 bp, synthetic construct
  source 1..25: mol_type = other DNA; mol_type = other DNA
aggaggctcaatctcagctgcctgg

SEQ ID NO: 12882 - DNA, 25 bp, synthetic construct
  source 1..25: mol_type = other DNA; mol_type = other DNA
aggaggctccatatcagctgcctgg

SEQ ID NO: 12883 - DNA, 25 bp, synthetic construct
  source 1..25: mol_type = other DNA; mol_type = other DNA
aggaggctccatctaagctgcctgg

SEQ ID NO: 12884 - DNA, 25 bp, synthetic construct
  source 1..25: mol_type = other DNA; mol_type = other DNA
aggaggctccatctcaactgcctgg

SEQ ID NO: 12885 - DNA, 25 bp, synthetic construct
  source 1..25: mol_type = other DNA; mol_type = other DNA
aggaggctccatctcagatgcctgg

SEQ ID NO: 12886 - DNA, 25 bp, synthetic construct
  source 1..25: mol_type = other DNA; mol_type = other DNA
aggaggctccatctcagctacctgg

SEQ ID NO: 12887 - DNA, 25 bp, synthetic construct
  source 1..25: mol_type = other DNA; mol_type = other DNA
aggaggctccatctcagctgactgg

SEQ ID NO: 12888 - DNA, 25 bp, synthetic construct
  source 1..25: mol_type = other DNA; mol_type = other DNA
aggaggctccatctcagctgcatgg

SEQ ID NO: 12889 - DNA, 25 bp, synthetic construct
  source 1..25: mol_type = other DNA; mol_type = other DNA
aggaggctccatctcagctgcctag

SEQ ID NO: 12890 - DNA, 25 bp, synthetic construct
  source 1..25: mol_type = other DNA; mol_type = other DNA
aaagaggctccatctcagctgcctg

SEQ ID NO: 12891 - DNA, 25 bp, synthetic construct
  source 1..25: mol_type = other DNA; mol_type = other DNA
aagaaggctccatctcagctgcctg

SEQ ID NO: 12892 - DNA, 25 bp, synthetic construct
  source 1..25: mol_type = other DNA
aaggaagctccatctcagctgcctg

SEQ ID NO: 12893 - DNA, 25 bp, synthetic construct
  source 1..25: mol_type = other DNA; mol_type = other DNA
aaggagactccatctcagctgcctg

SEQ ID NO: 12894 - DNA, 25 bp, synthetic construct
  source 1..25: mol_type = other DNA; mol_type = other DNA
aaggaggatccatctcagctgcctg

SEQ ID NO: 12895 - DNA, 25 bp, synthetic construct
  source 1..25: mol_type = other DNA; mol_type = other DNA
aaggaggctacatctcagctgcctg

SEQ ID NO: 12896 - DNA, 25 bp, synthetic construct
  source 1..25: mol_type = other DNA; mol_type = other DNA
aaggaggctcaatctcagctgcctg

SEQ ID NO: 12897 - DNA, 25 bp, synthetic construct
  source 1..25: mol_type = other DNA; mol_type = other DNA
aaggaggctccatatcagctgcctg

SEQ ID NO: 12898 - DNA, 25 bp, synthetic construct
  source 1..25: mol_type = other DNA; mol_type = other DNA
aaggaggctccatctaagctgcctg

SEQ ID NO: 12899 - DNA, 25 bp, synthetic construct
  source 1..25: mol_type = other DNA; mol_type = other DNA
aaggaggctccatctcaactgcctg

SEQ ID NO: 12900 - DNA, 25 bp, synthetic construct
  source 1..25: mol_type = other DNA; mol_type = other DNA
aaggaggctccatctcagatgcctg

SEQ ID NO: 12901 - DNA, 25 bp, synthetic construct
  source 1..25: mol_type = other DNA; mol_type = other DNA
aaggaggctccatctcagctacctg

SEQ ID NO: 12902 - DNA, 25 bp, synthetic construct
  source 1..25: mol_type = other DNA; mol_type = other DNA
aaggaggctccatctcagctgactg

SEQ ID NO: 12903 - DNA, 25 bp, synthetic construct
  source 1..25: mol_type = other DNA; mol_type = other DNA
aaggaggctccatctcagctgcatg

SEQ ID NO: 12904 - DNA, 25 bp, synthetic construct
  source 1..25: mol_type = other DNA; mol_type = other DNA
aaaggaggctccatctcagctgcct

SEQ ID NO: 12905 - DNA, 25 bp, synthetic construct
  source 1..25: mol_type = other DNA; mol_type = other DNA
caaagaggctccatctcagctgcct

SEQ ID NO: 12906 - DNA, 25 bp, synthetic construct
  source 1..25: mol_type = other DNA; mol_type = other DNA
caagaaggctccatctcagctgcct

SEQ ID NO: 12907 - DNA, 25 bp, synthetic construct
  source 1..25: mol_type = other DNA; mol_type = other DNA
caaggaagctccatctcagctgcct

SEQ ID NO: 12908 - DNA, 25 bp, synthetic construct
  source 1..25: mol_type = other DNA; mol_type = other DNA
caaggagactccatctcagctgcct

SEQ ID NO: 12909 - DNA, 25 bp, synthetic construct
  source 1..25: mol_type = other DNA; mol_type = other DNA
caaggaggatccatctcagctgcct

SEQ ID NO: 12910 - DNA, 25 bp, synthetic construct
  source 1..25: mol_type = other DNA; mol_type = other DNA
caaggaggctacatctcagctgcct

SEQ ID NO: 12911 - DNA, 25 bp, synthetic construct
  source 1..25: mol_type = other DNA; mol_type = other DNA
caaggaggctcaatctcagctgcct

SEQ ID NO: 12912 - DNA, 25 bp, synthetic construct
  source 1..25: mol_type = other DNA; mol_type = other DNA
caaggaggctccatatcagctgcct

SEQ ID NO: 12913 - DNA, 25 bp, synthetic construct
  source 1..25: mol_type = other DNA; mol_type = other DNA
caaggaggctccatctaagctgcct

SEQ ID NO: 12914 - DNA, 25 bp, synthetic construct
  source 1..25: mol_type = other DNA; mol_type = other DNA
caaggaggctccatctcaactgcct

SEQ ID NO: 12915 - DNA, 25 bp, synthetic construct
  source 1..25: mol_type = other DNA; mol_type = other DNA
caaggaggctccatctcagatgcct

SEQ ID NO: 12916 - DNA, 25 bp, synthetic construct
  source 1..25: mol_type = other DNA; mol_type = other DNA
caaggaggctccatctcagctgact

SEQ ID NO: 12917 - DNA, 25 bp, synthetic construct
  source 1..25: mol_type = other DNA; mol_type = other DNA
caaggaggctccatctcagctgcat

SEQ ID NO: 12918 - DNA, 25 bp, synthetic construct
  source 1..25: mol_type = other DNA; mol_type = other DNA
tcaaggaggctccatctcagctgcc

SEQ ID NO: 12919 - DNA, 25 bp, synthetic construct
  source 1..25: mol_type = other DNA; mol_type = other DNA
gtaaggaggctccatctcagctgcc

SEQ ID NO: 12920 - DNA, 25 bp, synthetic construct
  source 1..25: mol_type = other DNA; mol_type = other DNA
gcaatgaggctccatctcagctgcc

SEQ ID NO: 12921 - DNA, 25 bp, synthetic construct
  source 1..25: mol_type = other DNA; mol_type = other DNA
gcaagtaggctccatctcagctgcc

SEQ ID NO: 12922 - DNA, 25 bp, synthetic construct
  source 1..25: mol_type = other DNA; mol_type = other DNA
gcaaggatgctccatctcagctgcc

SEQ ID NO: 12923 - DNA, 25 bp, synthetic construct
  source 1..25: mol_type = other DNA; mol_type = other DNA
gcaaggagtctccatctcagctgcc

SEQ ID NO: 12924 - DNA, 25 bp, synthetic construct
  source 1..25: mol_type = other DNA; mol_type = other DNA
gcaaggaggttccatctcagctgcc

SEQ ID NO: 12925 - DNA, 25 bp, synthetic construct
  source 1..25: mol_type = other DNA; mol_type = other DNA
gcaaggaggcttcatctcagctgcc

SEQ ID NO: 12926 - DNA, 25 bp, synthetic construct
  source 1..25: mol_type = other DNA; mol_type = other DNA
gcaaggaggctctatctcagctgcc

SEQ ID NO: 12927 - DNA, 25 bp, synthetic construct
  source 1..25: mol_type = other DNA; mol_type = other DNA
gcaaggaggctccatttcagctgcc

SEQ ID NO: 12928 - DNA, 25 bp, synthetic construct
  source 1..25: mol_type = other DNA; mol_type = other DNA
gcaaggaggctccatcttagctgcc

SEQ ID NO: 12929 - DNA, 25 bp, synthetic construct
  source 1..25: mol_type = other DNA; mol_type = other DNA
gcaaggaggctccatctcatctgcc

SEQ ID NO: 12930 - DNA, 25 bp, synthetic construct
  source 1..25: mol_type = other DNA; mol_type = other DNA
gcaaggaggctccatctcagttgcc

SEQ ID NO: 12931 - DNA, 25 bp, synthetic construct
  source 1..25: mol_type = other DNA; mol_type = other DNA
gcaaggaggctccatctcagcttcc

SEQ ID NO: 12932 - DNA, 25 bp, synthetic construct
  source 1..25: mol_type = other DNA; mol_type = other DNA
gcaaggaggctccatctcagctgtc

SEQ ID NO: 12933 - DNA, 25 bp, synthetic construct
  source 1..25: mol_type = other DNA; mol_type = other DNA
gcaaggaggctccatctcagctgct

SEQ ID NO: 12934 - DNA, 25 bp, synthetic construct
  source 1..25: mol_type = other DNA; mol_type = other DNA
atcaaggaggctccatctcagctgc

SEQ ID NO: 12935 - DNA, 25 bp, synthetic construct
  source 1..25: mol_type = other DNA; mol_type = other DNA
agtaaggaggctccatctcagctgc

SEQ ID NO: 12936 - DNA, 25 bp, synthetic construct
  source 1..25: mol_type = other DNA; mol_type = other DNA
agcaatgaggctccatctcagctgc

SEQ ID NO: 12937 - DNA, 25 bp, synthetic construct
  source 1..25: mol_type = other DNA; mol_type = other DNA
agcaagtaggctccatctcagctgc

SEQ ID NO: 12938 - DNA, 25 bp, synthetic construct
  source 1..25: mol_type = other DNA; mol_type = other DNA
agcaaggatgctccatctcagctgc

SEQ ID NO: 12939 - DNA, 25 bp, synthetic construct
  source 1..25: mol_type = other DNA; mol_type = other DNA
agcaaggagtctccatctcagctgc

SEQ ID NO: 12940 - DNA, 25 bp, synthetic construct
  source 1..25: mol_type = other DNA; mol_type = other DNA
agcaaggaggttccatctcagctgc

SEQ ID NO: 12941 - DNA, 25 bp, synthetic construct
  source 1..25: mol_type = other DNA; mol_type = other DNA
agcaaggaggcttcatctcagctgc

SEQ ID NO: 12942 - DNA, 25 bp, synthetic construct
  source 1..25: mol_type = other DNA; mol_type = other DNA
agcaaggaggctctatctcagctgc

SEQ ID NO: 12943 - DNA, 25 bp, synthetic construct
  source 1..25: mol_type = other DNA; mol_type = other DNA
agcaaggaggctccatttcagctgc

SEQ ID NO: 12944 - DNA, 25 bp, synthetic construct
  source 1..25: mol_type = other DNA; mol_type = other DNA
agcaaggaggctccatcttagctgc

SEQ ID NO: 12945 - DNA, 25 bp, synthetic construct
  source 1..25: mol_type = other DNA; mol_type = other DNA
agcaaggaggctccatctcatctgc

SEQ ID NO: 12946 - DNA, 25 bp, synthetic construct
  source 1..25: mol_type = other DNA; mol_type = other DNA
agcaaggaggctccatctcagttgc

SEQ ID NO: 12947 - DNA, 25 bp, synthetic construct
  source 1..25: mol_type = other DNA; mol_type = other DNA
agcaaggaggctccatctcagcttc

SEQ ID NO: 12948 - DNA, 25 bp, synthetic construct
  source 1..25: mol_type = other DNA; mol_type = other DNA
agcaaggaggctccatctcagctgt

SEQ ID NO: 12949 - DNA, 25 bp, synthetic construct
  source 1..25: mol_type = other DNA; mol_type = other DNA
tagcaaggaggctccatctcagctg

SEQ ID NO: 12950 - DNA, 25 bp, synthetic construct
  source 1..25: mol_type = other DNA; mol_type = other DNA
catcaaggaggctccatctcagctg

SEQ ID NO: 12951 - DNA, 25 bp, synthetic construct
  source 1..25: mol_type = other DNA; mol_type = other DNA
cagtaaggaggctccatctcagctg

SEQ ID NO: 12952 - DNA, 25 bp, synthetic construct
  source 1..25: mol_type = other DNA; mol_type = other DNA
cagcaatgaggctccatctcagctg

SEQ ID NO: 12953 - DNA, 25 bp, synthetic construct
  source 1..25: mol_type = other DNA; mol_type = other DNA
cagcaagtaggctccatctcagctg

SEQ ID NO: 12954 - DNA, 25 bp, synthetic construct
  source 1..25: mol_type = other DNA; mol_type = other DNA
cagcaaggatgctccatctcagctg

SEQ ID NO: 12955 - DNA, 25 bp, synthetic construct
  source 1..25: mol_type = other DNA; mol_type = other DNA
cagcaaggagtctccatctcagctg

SEQ ID NO: 12956 - DNA, 25 bp, synthetic construct
  source 1..25: mol_type = other DNA; mol_type = other DNA
cagcaaggaggttccatctcagctg

SEQ ID NO: 12957 - DNA, 25 bp, synthetic construct
  source 1..25: mol_type = other DNA; mol_type = other DNA
cagcaaggaggcttcatctcagctg

SEQ ID NO: 12958 - DNA, 25 bp, synthetic construct
  source 1..25: mol_type = other DNA; mol_type = other DNA
cagcaaggaggctctatctcagctg

SEQ ID NO: 12959 - DNA, 25 bp, synthetic construct
  source 1..25: mol_type = other DNA; mol_type = other DNA
cagcaaggaggctccatttcagctg

SEQ ID NO: 12960 - DNA, 25 bp, synthetic construct
  source 1..25: mol_type = other DNA; mol_type = other DNA
cagcaaggaggctccatcttagctg

SEQ ID NO: 12961 - DNA, 25 bp, synthetic construct
  source 1..25: mol_type = other DNA; mol_type = other DNA
cagcaaggaggctccatctcatctg

SEQ ID NO: 12962 - DNA, 25 bp, synthetic construct
  source 1..25: mol_type = other DNA; mol_type = other DNA
cagcaaggaggctccatctcagttg

SEQ ID NO: 12963 - DNA, 25 bp, synthetic construct
  source 1..25: mol_type = other DNA; mol_type = other DNA
atagcaaggaggctccatctcagct

SEQ ID NO: 12964 - DNA, 25 bp, synthetic construct
  source 1..25: mol_type = other DNA; mol_type = other DNA
acatcaaggaggctccatctcagct

SEQ ID NO: 12965 - DNA, 25 bp, synthetic construct
  source 1..25: mol_type = other DNA; mol_type = other DNA
acagtaaggaggctccatctcagct

SEQ ID NO: 12966 - DNA, 25 bp, synthetic construct
  source 1..25: mol_type = other DNA; mol_type = other DNA
acagcaatgaggctccatctcagct

SEQ ID NO: 12967 - DNA, 25 bp, synthetic construct
  source 1..25: mol_type = other DNA; mol_type = other DNA
acagcaagtaggctccatctcagct

SEQ ID NO: 12968 - DNA, 25 bp, synthetic construct
  source 1..25: mol_type = other DNA; mol_type = other DNA
acagcaaggatgctccatctcagct

SEQ ID NO: 12969 - DNA, 25 bp, synthetic construct
  source 1..25: mol_type = other DNA; mol_type = other DNA
acagcaaggagtctccatctcagct

SEQ ID NO: 12970 - DNA, 25 bp, synthetic construct
  source 1..25: mol_type = other DNA; mol_type = other DNA
acagcaaggaggttccatctcagct

SEQ ID NO: 12971 - DNA, 25 bp, synthetic construct
  source 1..25: mol_type = other DNA; mol_type = other DNA
acagcaaggaggcttcatctcagct

SEQ ID NO: 12972 - DNA, 25 bp, synthetic construct
  source 1..25: mol_type = other DNA; mol_type = other DNA
acagcaaggaggctctatctcagct

SEQ ID NO: 12973 - DNA, 25 bp, synthetic construct
  source 1..25: mol_type = other DNA; mol_type = other DNA
acagcaaggaggctccatttcagct

SEQ ID NO: 12974 - DNA, 25 bp, synthetic construct
  source 1..25: mol_type = other DNA; mol_type = other DNA
acagcaaggaggctccatcttagct

SEQ ID NO: 12975 - DNA, 25 bp, synthetic construct
  source 1..25: mol_type = other DNA; mol_type = other DNA
acagcaaggaggctccatctcatct

SEQ ID NO: 12976 - DNA, 25 bp, synthetic construct
  source 1..25: mol_type = other DNA; mol_type = other DNA
acagcaaggaggctccatctcagtt

SEQ ID NO: 12977 - DNA, 25 bp, synthetic construct
  source 1..25: mol_type = other DNA; mol_type = other DNA
tacagcaaggaggctccatctcagc

SEQ ID NO: 12978 - DNA, 25 bp, synthetic construct
  source 1..25: mol_type = other DNA; mol_type = other DNA
catagcaaggaggctccatctcagc

SEQ ID NO: 12979 - DNA, 25 bp, synthetic construct
  source 1..25: mol_type = other DNA; mol_type = other DNA
cacatcaaggaggctccatctcagc

SEQ ID NO: 12980 - DNA, 25 bp, synthetic construct
  source 1..25: mol_type = other DNA; mol_type = other DNA
cacagtaaggaggctccatctcagc

SEQ ID NO: 12981 - DNA, 25 bp, synthetic construct
  source 1..25: mol_type = other DNA; mol_type = other DNA
cacagcaatgaggctccatctcagc

SEQ ID NO: 12982 - DNA, 25 bp, synthetic construct
  source 1..25: mol_type = other DNA; mol_type = other DNA
cacagcaagtaggctccatctcagc

SEQ ID NO: 12983 - DNA, 25 bp, synthetic construct
  source 1..25: mol_type = other DNA; mol_type = other DNA
cacagcaaggatgctccatctcagc

SEQ ID NO: 12984 - DNA, 25 bp, synthetic construct
  source 1..25: mol_type = other DNA; mol_type = other DNA
cacagcaaggagtctccatctcagc

SEQ ID NO: 12985 - DNA, 25 bp, synthetic construct
  source 1..25: mol_type = other DNA; mol_type = other DNA
cacagcaaggaggttccatctcagc

SEQ ID NO: 12986 - DNA, 25 bp, synthetic construct
  source 1..25: mol_type = other DNA; mol_type = other DNA
cacagcaaggaggcttcatctcagc

SEQ ID NO: 12987 - DNA, 25 bp, synthetic construct
  source 1..25: mol_type = other DNA; mol_type = other DNA
cacagcaaggaggctctatctcagc

SEQ ID NO: 12988 - DNA, 25 bp, synthetic construct
  source 1..25: mol_type = other DNA; mol_type = other DNA
cacagcaaggaggctccatttcagc

SEQ ID NO: 12989 - DNA, 25 bp, synthetic construct
  source 1..25: mol_type = other DNA; mol_type = other DNA
cacagcaaggaggctccatcttagc

SEQ ID NO: 12990 - DNA, 25 bp, synthetic construct
  source 1..25: mol_type = other DNA; mol_type = other DNA
cacagcaaggaggctccatctcatc

SEQ ID NO: 12991 - DNA, 25 bp, synthetic construct
  source 1..25: mol_type = other DNA; mol_type = other DNA
cacagcaaggaggctccatctcagt

SEQ ID NO: 12992 - DNA, 25 bp, synthetic construct
  source 1..25: mol_type = other DNA; mol_type = other DNA
tcacagcaaggaggctccatctcag

SEQ ID NO: 12993 - DNA, 25 bp, synthetic construct
  source 1..25: mol_type = other DNA; mol_type = other DNA
gtacagcaaggaggctccatctcag

SEQ ID NO: 12994 - DNA, 25 bp, synthetic construct
  source 1..25: mol_type = other DNA; mol_type = other DNA
gcatagcaaggaggctccatctcag

SEQ ID NO: 12995 - DNA, 25 bp, synthetic construct
  source 1..25: mol_type = other DNA; mol_type = other DNA
gcacatcaaggaggctccatctcag

SEQ ID NO: 12996 - DNA, 25 bp, synthetic construct
  source 1..25: mol_type = other DNA; mol_type = other DNA
gcacagtaaggaggctccatctcag

SEQ ID NO: 12997 - DNA, 25 bp, synthetic construct
  source 1..25: mol_type = other DNA; mol_type = other DNA
gcacagcaatgaggctccatctcag

SEQ ID NO: 12998 - DNA, 25 bp, synthetic construct
  source 1..25: mol_type = other DNA; mol_type = other DNA
gcacagcaagtaggctccatctcag

SEQ ID NO: 12999 - DNA, 25 bp, synthetic construct
  source 1..25: mol_type = other DNA; mol_type = other DNA
gcacagcaaggatgctccatctcag

SEQ ID NO: 13000 - DNA, 25 bp, synthetic construct
  source 1..25: mol_type = other DNA; mol_type = other DNA
gcacagcaaggagtctccatctcag

SEQ ID NO: 13001 - DNA, 25 bp, synthetic construct
  source 1..25: mol_type = other DNA; mol_type = other DNA
gcacagcaaggaggttccatctcag

SEQ ID NO: 13002 - DNA, 25 bp, synthetic construct
  source 1..25: mol_type = other DNA; mol_type = other DNA
gcacagcaaggaggcttcatctcag

SEQ ID NO: 13003 - DNA, 25 bp, synthetic construct
  source 1..25: mol_type = other DNA; mol_type = other DNA
gcacagcaaggaggctctatctcag

SEQ ID NO: 13004 - DNA, 25 bp, synthetic construct
  source 1..25: mol_type = other DNA; mol_type = other DNA
gcacagcaaggaggctccatttcag

SEQ ID NO: 13005 - DNA, 25 bp, synthetic construct
  source 1..25: mol_type = other DNA; mol_type = other DNA
gcacagcaaggaggctccatcttag

SEQ ID NO: 13006 - DNA, 25 bp, synthetic construct
  source 1..25: mol_type = other DNA; mol_type = other DNA
ttcacagcaaggaggctccatctca

SEQ ID NO: 13007 - DNA, 25 bp, synthetic construct
  source 1..25: mol_type = other DNA; mol_type = other DNA
tgtacagcaaggaggctccatctca

SEQ ID NO: 13008 - DNA, 25 bp, synthetic construct
  source 1..25: mol_type = other DNA; mol_type = other DNA
tgcatagcaaggaggctccatctca

SEQ ID NO: 13009 - DNA, 25 bp, synthetic construct
  source 1..25: mol_type = other DNA; mol_type = other DNA
tgcacatcaaggaggctccatctca

SEQ ID NO: 13010 - DNA, 25 bp, synthetic construct
  source 1..25: mol_type = other DNA; mol_type = other DNA
tgcacagtaaggaggctccatctca

SEQ ID NO: 13011 - DNA, 25 bp, synthetic construct
  source 1..25: mol_type = other DNA; mol_type = other DNA
tgcacagcaatgaggctccatctca

SEQ ID NO: 13012 - DNA, 25 bp, synthetic construct
  source 1..25: mol_type = other DNA; mol_type = other DNA
tgcacagcaagtaggctccatctca

SEQ ID NO: 13013 - DNA, 25 bp, synthetic construct
  source 1..25: mol_type = other DNA; mol_type = other DNA
tgcacagcaaggatgctccatctca

SEQ ID NO: 13014 - DNA, 25 bp, synthetic construct
  source 1..25: mol_type = other DNA; mol_type = other DNA
tgcacagcaaggagtctccatctca

SEQ ID NO: 13015 - DNA, 25 bp, synthetic construct
  source 1..25: mol_type = other DNA; mol_type = other DNA
tgcacagcaaggaggttccatctca

SEQ ID NO: 13016 - DNA, 25 bp, synthetic construct
  source 1..25: mol_type = other DNA; mol_type = other DNA
tgcacagcaaggaggcttcatctca

SEQ ID NO: 13017 - DNA, 25 bp, synthetic construct
  source 1..25: mol_type = other DNA; mol_type = other DNA
tgcacagcaaggaggctctatctca

SEQ ID NO: 13018 - DNA, 25 bp, synthetic construct
  source 1..25: mol_type = other DNA; mol_type = other DNA
tgcacagcaaggaggctccatttca

SEQ ID NO: 13019 - DNA, 25 bp, synthetic construct
  source 1..25: mol_type = other DNA; mol_type = other DNA
tgcacagcaaggaggctccatctta

SEQ ID NO: 13020 - DNA, 25 bp, synthetic construct
  source 1..25: mol_type = other DNA; mol_type = other DNA
ttgcacagcaaggaggctccatctc

SEQ ID NO: 13021 - DNA, 25 bp, synthetic construct
  source 1..25: mol_type = other DNA; mol_type = other DNA
cttcacagcaaggaggctccatctc

SEQ ID NO: 13022 - DNA, 25 bp, synthetic construct
  source 1..25: mol_type = other DNA; mol_type = other DNA
ctgtacagcaaggaggctccatctc

SEQ ID NO: 13023 - DNA, 25 bp, synthetic construct
  source 1..25: mol_type = other DNA; mol_type = other DNA
ctgcatagcaaggaggctccatctc

SEQ ID NO: 13024 - DNA, 25 bp, synthetic construct
  source 1..25: mol_type = other DNA; mol_type = other DNA
ctgcacatcaaggaggctccatctc

SEQ ID NO: 13025 - DNA, 25 bp, synthetic construct
  source 1..25: mol_type = other DNA; mol_type = other DNA
ctgcacagtaaggaggctccatctc

SEQ ID NO: 13026 - DNA, 25 bp, synthetic construct
  source 1..25: mol_type = other DNA; mol_type = other DNA
ctgcacagcaatgaggctccatctc

SEQ ID NO: 13027 - DNA, 25 bp, synthetic construct
  source 1..25: mol_type = other DNA; mol_type = other DNA
ctgcacagcaagtaggctccatctc

SEQ ID NO: 13028 - DNA, 25 bp, synthetic construct
  source 1..25: mol_type = other DNA; mol_type = other DNA
ctgcacagcaaggatgctccatctc

SEQ ID NO: 13029 - DNA, 25 bp, synthetic construct
  source 1..25: mol_type = other DNA; mol_type = other DNA
ctgcacagcaaggagtctccatctc

SEQ ID NO: 13030 - DNA, 25 bp, synthetic construct
  source 1..25: mol_type = other DNA; mol_type = other DNA
ctgcacagcaaggaggttccatctc

SEQ ID NO: 13031 - DNA, 25 bp, synthetic construct
  source 1..25: mol_type = other DNA; mol_type = other DNA
ctgcacagcaaggaggcttcatctc

SEQ ID NO: 13032 - DNA, 25 bp, synthetic construct
  source 1..25: mol_type = other DNA; mol_type = other DNA
ctgcacagcaaggaggctctatctc

SEQ ID NO: 13033 - DNA, 25 bp, synthetic construct
  source 1..25: mol_type = other DNA; mol_type = other DNA
ctgcacagcaaggaggctccatttc

SEQ ID NO: 13034 - DNA, 25 bp, synthetic construct
  source 1..25: mol_type = other DNA; mol_type = other DNA
ctgcacagcaaggaggctccatctt

SEQ ID NO: 13035 - DNA, 25 bp, synthetic construct
  source 1..25: mol_type = other DNA; mol_type = other DNA
tttgcacagcaaggaggctccatct

SEQ ID NO: 13036 - DNA, 25 bp, synthetic construct
  source 1..25: mol_type = other DNA; mol_type = other DNA
tcttcacagcaaggaggctccatct

SEQ ID NO: 13037 - DNA, 25 bp, synthetic construct
  source 1..25: mol_type = other DNA; mol_type = other DNA
tctgtacagcaaggaggctccatct

SEQ ID NO: 13038 - DNA, 25 bp, synthetic construct
  source 1..25: mol_type = other DNA; mol_type = other DNA
tctgcatagcaaggaggctccatct

SEQ ID NO: 13039 - DNA, 25 bp, synthetic construct
  source 1..25: mol_type = other DNA; mol_type = other DNA
tctgcacatcaaggaggctccatct

SEQ ID NO: 13040 - DNA, 25 bp, synthetic construct
  source 1..25: mol_type = other DNA; mol_type = other DNA
tctgcacagtaaggaggctccatct

SEQ ID NO: 13041 - DNA, 25 bp, synthetic construct
  source 1..25: mol_type = other DNA; mol_type = other DNA
tctgcacagcaatgaggctccatct

SEQ ID NO: 13042 - DNA, 25 bp, synthetic construct
  source 1..25: mol_type = other DNA; mol_type = other DNA
tctgcacagcaagtaggctccatct

SEQ ID NO: 13043 - DNA, 25 bp, synthetic construct
  source 1..25: mol_type = other DNA; mol_type = other DNA
tctgcacagcaaggatgctccatct

SEQ ID NO: 13044 - DNA, 25 bp, synthetic construct
  source 1..25: mol_type = other DNA; mol_type = other DNA
tctgcacagcaaggagtctccatct

SEQ ID NO: 13045 - DNA, 25 bp, synthetic construct
  source 1..25: mol_type = other DNA; mol_type = other DNA
tctgcacagcaaggaggttccatct

SEQ ID NO: 13046 - DNA, 25 bp, synthetic construct
  source 1..25: mol_type = other DNA; mol_type = other DNA
tctgcacagcaaggaggcttcatct

SEQ ID NO: 13047 - DNA, 25 bp, synthetic construct
  source 1..25: mol_type = other DNA; mol_type = other DNA
tctgcacagcaaggaggctctatct

SEQ ID NO: 13048 - DNA, 25 bp, synthetic construct
  source 1..25: mol_type = other DNA; mol_type = other DNA
tctgcacagcaaggaggctccattt

SEQ ID NO: 13049 - DNA, 25 bp, synthetic construct
  source 1..25: mol_type = other DNA; mol_type = other DNA
ttctgcacagcaaggaggctccatc

SEQ ID NO: 13050 - DNA, 25 bp, synthetic construct
  source 1..25: mol_type = other DNA; mol_type = other DNA
ctttgcacagcaaggaggctccatc

SEQ ID NO: 13051 - DNA, 25 bp, synthetic construct
  source 1..25: mol_type = other DNA; mol_type = other DNA
ctcttcacagcaaggaggctccatc

SEQ ID NO: 13052 - DNA, 25 bp, synthetic construct
  source 1..25: mol_type = other DNA; mol_type = other DNA
ctctgtacagcaaggaggctccatc

SEQ ID NO: 13053 - DNA, 25 bp, synthetic construct
  source 1..25: mol_type = other DNA; mol_type = other DNA
ctctgcatagcaaggaggctccatc

SEQ ID NO: 13054 - DNA, 25 bp, synthetic construct
  source 1..25: mol_type = other DNA; mol_type = other DNA
ctctgcacatcaaggaggctccatc

SEQ ID NO: 13055 - DNA, 25 bp, synthetic construct
  source 1..25: mol_type = other DNA; mol_type = other DNA
ctctgcacagtaaggaggctccatc

SEQ ID NO: 13056 - DNA, 25 bp, synthetic construct
  source 1..25: mol_type = other DNA; mol_type = other DNA
ctctgcacagcaatgaggctccatc

SEQ ID NO: 13057 - DNA, 25 bp, synthetic construct
  source 1..25: mol_type = other DNA; mol_type = other DNA
ctctgcacagcaagtaggctccatc

SEQ ID NO: 13058 - DNA, 25 bp, synthetic construct
  source 1..25: mol_type = other DNA; mol_type = other DNA
ctctgcacagcaaggatgctccatc

SEQ ID NO: 13059 - DNA, 25 bp, synthetic construct
  source 1..25: mol_type = other DNA; mol_type = other DNA
ctctgcacagcaaggagtctccatc

SEQ ID NO: 13060 - DNA, 25 bp, synthetic construct
  source 1..25: mol_type = other DNA; mol_type = other DNA
ctctgcacagcaaggaggttccatc

SEQ ID NO: 13061 - DNA, 25 bp, synthetic construct
  source 1..25: mol_type = other DNA; mol_type = other DNA
ctctgcacagcaaggaggcttcatc

SEQ ID NO: 13062 - DNA, 25 bp, synthetic construct
  source 1..25: mol_type = other DNA; mol_type = other DNA
ctctgcacagcaaggaggctctatc

SEQ ID NO: 13063 - DNA, 25 bp, synthetic construct
  source 1..25: mol_type = other DNA; mol_type = other DNA
ctctgcacagcaaggaggctccatt

SEQ ID NO: 13064 - DNA, 25 bp, synthetic construct
  source 1..25: mol_type = other DNA; mol_type = other DNA
tttctgcacagcaaggaggctccat

SEQ ID NO: 13065 - DNA, 25 bp, synthetic construct
  source 1..25: mol_type = other DNA; mol_type = other DNA
tctttgcacagcaaggaggctccat

SEQ ID NO: 13066 - DNA, 25 bp, synthetic construct
  source 1..25: mol_type = other DNA; mol_type = other DNA
tctcttcacagcaaggaggctccat

SEQ ID NO: 13067 - DNA, 25 bp, synthetic construct
  source 1..25: mol_type = other DNA; mol_type = other DNA
tctctgtacagcaaggaggctccat

SEQ ID NO: 13068 - DNA, 25 bp, synthetic construct
  source 1..25: mol_type = other DNA; mol_type = other DNA
tctctgcatagcaaggaggctccat

SEQ ID NO: 13069 - DNA, 25 bp, synthetic construct
  source 1..25: mol_type = other DNA; mol_type = other DNA
tctctgcacatcaaggaggctccat

SEQ ID NO: 13070 - DNA, 25 bp, synthetic construct
  source 1..25: mol_type = other DNA; mol_type = other DNA
tctctgcacagtaaggaggctccat

SEQ ID NO: 13071 - DNA, 25 bp, synthetic construct
  source 1..25: mol_type = other DNA; mol_type = other DNA
tctctgcacagcaatgaggctccat

SEQ ID NO: 13072 - DNA, 25 bp, synthetic construct
  source 1..25: mol_type = other DNA; mol_type = other DNA
tctctgcacagcaagtaggctccat

SEQ ID NO: 13073 - DNA, 25 bp, synthetic construct
  source 1..25: mol_type = other DNA; mol_type = other DNA
tctctgcacagcaaggatgctccat

SEQ ID NO: 13074 - DNA, 25 bp, synthetic construct
  source 1..25: mol_type = other DNA; mol_type = other DNA
tctctgcacagcaaggagtctccat

SEQ ID NO: 13075 - DNA, 25 bp, synthetic construct
  source 1..25: mol_type = other DNA; mol_type = other DNA
tctctgcacagcaaggaggttccat

SEQ ID NO: 13076 - DNA, 25 bp, synthetic construct
  source 1..25: mol_type = other DNA; mol_type = other DNA
tctctgcacagcaaggaggcttcat

SEQ ID NO: 13077 - DNA, 25 bp, synthetic construct
  source 1..25: mol_type = other DNA; mol_type = other DNA
tctctgcacagcaaggaggctctat

SEQ ID NO: 13078 - DNA, 25 bp, synthetic construct
  source 1..25: mol_type = other DNA; mol_type = other DNA
ttttctgcacagcaaggaggctcca

SEQ ID NO: 13079 - DNA, 25 bp, synthetic construct
  source 1..25: mol_type = other DNA; mol_type = other DNA
ttctttgcacagcaaggaggctcca

SEQ ID NO: 13080 - DNA, 25 bp, synthetic construct
  source 1..25: mol_type = other DNA; mol_type = other DNA
ttctcttcacagcaaggaggctcca

SEQ ID NO: 13081 - DNA, 25 bp, synthetic construct
  source 1..25: mol_type = other DNA; mol_type = other DNA
ttctctgtacagcaaggaggctcca

SEQ ID NO: 13082 - DNA, 25 bp, synthetic construct
  source 1..25: mol_type = other DNA; mol_type = other DNA
ttctctgcatagcaaggaggctcca

SEQ ID NO: 13083 - DNA, 25 bp, synthetic construct
  source 1..25: mol_type = other DNA; mol_type = other DNA
ttctctgcacatcaaggaggctcca

SEQ ID NO: 13084 - DNA, 25 bp, synthetic construct
  source 1..25: mol_type = other DNA; mol_type = other DNA
ttctctgcacagtaaggaggctcca

SEQ ID NO: 13085 - DNA, 25 bp, synthetic construct
  source 1..25: mol_type = other DNA; mol_type = other DNA
ttctctgcacagcaatgaggctcca

SEQ ID NO: 13086 - DNA, 25 bp, synthetic construct
  source 1..25: mol_type = other DNA; mol_type = other DNA
ttctctgcacagcaagtaggctcca

SEQ ID NO: 13087 - DNA, 25 bp, synthetic construct
  source 1..25: mol_type = other DNA; mol_type = other DNA
ttctctgcacagcaaggatgctcca

SEQ ID NO: 13088 - DNA, 25 bp, synthetic construct
  source 1..25: mol_type = other DNA; mol_type = other DNA
ttctctgcacagcaaggagtctcca

SEQ ID NO: 13089 - DNA, 25 bp, synthetic construct
  source 1..25: mol_type = other DNA; mol_type = other DNA
ttctctgcacagcaaggaggttcca

SEQ ID NO: 13090 - DNA, 25 bp, synthetic construct
  source 1..25: mol_type = other DNA; mol_type = other DNA
ttctctgcacagcaaggaggcttca

SEQ ID NO: 13091 - DNA, 25 bp, synthetic construct
  source 1..25: mol_type = other DNA; mol_type = other DNA
ttctctgcacagcaaggaggctcta

SEQ ID NO: 13092 - DNA, 25 bp, synthetic construct
  source 1..25: mol_type = other DNA; mol_type = other DNA
attctctgcacagcaaggaggctcc

SEQ ID NO: 13093 - DNA, 25 bp, synthetic construct
  source 1..25: mol_type = other DNA; mol_type = other DNA
cttatctgcacagcaaggaggctcc

SEQ ID NO: 13094 - DNA, 25 bp, synthetic construct
  source 1..25: mol_type = other DNA; mol_type = other DNA
cttctatgcacagcaaggaggctcc

SEQ ID NO: 13095 - DNA, 25 bp, synthetic construct
  source 1..25: mol_type = other DNA; mol_type = other DNA
cttctctacacagcaaggaggctcc

SEQ ID NO: 13096 - DNA, 25 bp, synthetic construct
  source 1..25: mol_type = other DNA; mol_type = other DNA
cttctctgaacagcaaggaggctcc

SEQ ID NO: 13097 - DNA, 25 bp, synthetic construct
  source 1..25: mol_type = other DNA; mol_type = other DNA
cttctctgcaaagcaaggaggctcc

SEQ ID NO: 13098 - DNA, 25 bp, synthetic construct
  source 1..25: mol_type = other DNA; mol_type = other DNA
cttctctgcacaacaaggaggctcc

SEQ ID NO: 13099 - DNA, 25 bp, synthetic construct
  source 1..25: mol_type = other DNA; mol_type = other DNA
cttctctgcacagaaaggaggctcc

SEQ ID NO: 13100 - DNA, 25 bp, synthetic construct
  source 1..25: mol_type = other DNA; mol_type = other DNA
cttctctgcacagcaaagaggctcc

SEQ ID NO: 13101 - DNA, 25 bp, synthetic construct
  source 1..25: mol_type = other DNA; mol_type = other DNA
cttctctgcacagcaagaaggctcc

SEQ ID NO: 13102 - DNA, 25 bp, synthetic construct
  source 1..25: mol_type = other DNA; mol_type = other DNA
cttctctgcacagcaaggaagctcc

SEQ ID NO: 13103 - DNA, 25 bp, synthetic construct
  source 1..25: mol_type = other DNA; mol_type = other DNA
cttctctgcacagcaaggaggatcc

SEQ ID NO: 13104 - DNA, 25 bp, synthetic construct
  source 1..25: mol_type = other DNA; mol_type = other DNA
cttctctgcacagcaaggaggctac

SEQ ID NO: 13105 - DNA, 25 bp, synthetic construct
  source 1..25: mol_type = other DNA; mol_type = other DNA
cttctctgcacagcaaggaggctca

SEQ ID NO: 13106 - DNA, 25 bp, synthetic construct
  source 1..25: mol_type = other DNA; mol_type = other DNA
acttctctgcacagcaaggaggctc

SEQ ID NO: 13107 - DNA, 25 bp, synthetic construct
  source 1..25: mol_type = other DNA; mol_type = other DNA
gattctctgcacagcaaggaggctc

SEQ ID NO: 13108 - DNA, 25 bp, synthetic construct
  source 1..25: mol_type = other DNA; mol_type = other DNA
gcttatctgcacagcaaggaggctc

SEQ ID NO: 13109 - DNA, 25 bp, synthetic construct
  source 1..25: mol_type = other DNA; mol_type = other DNA
gcttctatgcacagcaaggaggctc

SEQ ID NO: 13110 - DNA, 25 bp, synthetic construct
  source 1..25: mol_type = other DNA; mol_type = other DNA
gcttctctacacagcaaggaggctc

SEQ ID NO: 13111 - DNA, 25 bp, synthetic construct
  source 1..25: mol_type = other DNA; mol_type = other DNA
gcttctctgaacagcaaggaggctc

SEQ ID NO: 13112 - DNA, 25 bp, synthetic construct
  source 1..25: mol_type = other DNA; mol_type = other DNA
gcttctctgcaaagcaaggaggctc

SEQ ID NO: 13113 - DNA, 25 bp, synthetic construct
  source 1..25: mol_type = other DNA; mol_type = other DNA
gcttctctgcacaacaaggaggctc

SEQ ID NO: 13114 - DNA, 25 bp, synthetic construct
  source 1..25: mol_type = other DNA; mol_type = other DNA
gcttctctgcacagaaaggaggctc

SEQ ID NO: 13115 - DNA, 25 bp, synthetic construct
  source 1..25: mol_type = other DNA; mol_type = other DNA
gcttctctgcacagcaaagaggctc

SEQ ID NO: 13116 - DNA, 25 bp, synthetic construct
  source 1..25: mol_type = other DNA; mol_type = other DNA
gcttctctgcacagcaagaaggctc

SEQ ID NO: 13117 - DNA, 25 bp, synthetic construct
  source 1..25: mol_type = other DNA; mol_type = other DNA
gcttctctgcacagcaaggaagctc

SEQ ID NO: 13118 - DNA, 25 bp, synthetic construct
  source 1..25: mol_type = other DNA; mol_type = other DNA
gcttctctgcacagcaaggaggatc

SEQ ID NO: 13119 - DNA, 25 bp, synthetic construct
  source 1..25: mol_type = other DNA; mol_type = other DNA
gcttctctgcacagcaaggaggcta

SEQ ID NO: 13120 - DNA, 25 bp, synthetic construct
  source 1..25: mol_type = other DNA; mol_type = other DNA
atcttctctgcacagcaaggaggct

SEQ ID NO: 13121 - DNA, 25 bp, synthetic construct
  source 1..25: mol_type = other DNA; mol_type = other DNA
agtttctctgcacagcaaggaggct

SEQ ID NO: 13122 - DNA, 25 bp, synthetic construct
  source 1..25: mol_type = other DNA; mol_type = other DNA
agcttttctgcacagcaaggaggct

SEQ ID NO: 13123 - DNA, 25 bp, synthetic construct
  source 1..25: mol_type = other DNA; mol_type = other DNA
agcttctttgcacagcaaggaggct

SEQ ID NO: 13124 - DNA, 25 bp, synthetic construct
  source 1..25: mol_type = other DNA; mol_type = other DNA
agcttctcttcacagcaaggaggct

SEQ ID NO: 13125 - DNA, 25 bp, synthetic construct
  source 1..25: mol_type = other DNA; mol_type = other DNA
agcttctctgtacagcaaggaggct

SEQ ID NO: 13126 - DNA, 25 bp, synthetic construct
  source 1..25: mol_type = other DNA; mol_type = other DNA
agcttctctgcatagcaaggaggct

SEQ ID NO: 13127 - DNA, 25 bp, synthetic construct
  source 1..25: mol_type = other DNA; mol_type = other DNA
agcttctctgcacatcaaggaggct

SEQ ID NO: 13128 - DNA, 25 bp, synthetic construct
  source 1..25: mol_type = other DNA; mol_type = other DNA
agcttctctgcacagtaaggaggct

SEQ ID NO: 13129 - DNA, 25 bp, synthetic construct
  source 1..25: mol_type = other DNA; mol_type = other DNA
agcttctctgcacagcaatgaggct

SEQ ID NO: 13130 - DNA, 25 bp, synthetic construct
  source 1..25: mol_type = other DNA; mol_type = other DNA
agcttctctgcacagcaagtaggct

SEQ ID NO: 13131 - DNA, 25 bp, synthetic construct
  source 1..25: mol_type = other DNA; mol_type = other DNA
agcttctctgcacagcaaggatgct

SEQ ID NO: 13132 - DNA, 25 bp, synthetic construct
  source 1..25: mol_type = other DNA; mol_type = other DNA
agcttctctgcacagcaaggagtct

SEQ ID NO: 13133 - DNA, 25 bp, synthetic construct
  source 1..25: mol_type = other DNA; mol_type = other DNA
agcttctctgcacagcaaggaggtt

SEQ ID NO: 13134 - DNA, 25 bp, synthetic construct
  source 1..25: mol_type = other DNA; mol_type = other DNA
tagcttctctgcacagcaaggaggc

SEQ ID NO: 13135 - DNA, 25 bp, synthetic construct
  source 1..25: mol_type = other DNA; mol_type = other DNA
catcttctctgcacagcaaggaggc

SEQ ID NO: 13136 - DNA, 25 bp, synthetic construct
  source 1..25: mol_type = other DNA; mol_type = other DNA
cagtttctctgcacagcaaggaggc

SEQ ID NO: 13137 - DNA, 25 bp, synthetic construct
  source 1..25: mol_type = other DNA; mol_type = other DNA
cagcttttctgcacagcaaggaggc

SEQ ID NO: 13138 - DNA, 25 bp, synthetic construct
  source 1..25: mol_type = other DNA; mol_type = other DNA
cagcttctttgcacagcaaggaggc

SEQ ID NO: 13139 - DNA, 25 bp, synthetic construct
  source 1..25: mol_type = other DNA; mol_type = other DNA
cagcttctcttcacagcaaggaggc

SEQ ID NO: 13140 - DNA, 25 bp, synthetic construct
  source 1..25: mol_type = other DNA; mol_type = other DNA
cagcttctctgtacagcaaggaggc

SEQ ID NO: 13141 - DNA, 25 bp, synthetic construct
  source 1..25: mol_type = other DNA; mol_type = other DNA
cagcttctctgcatagcaaggaggc

SEQ ID NO: 13142 - DNA, 25 bp, synthetic construct
  source 1..25: mol_type = other DNA; mol_type = other DNA
cagcttctctgcacatcaaggaggc

SEQ ID NO: 13143 - DNA, 25 bp, synthetic construct
  source 1..25: mol_type = other DNA; mol_type = other DNA
cagcttctctgcacagtaaggaggc

SEQ ID NO: 13144 - DNA, 25 bp, synthetic construct
  source 1..25: mol_type = other DNA; mol_type = other DNA
cagcttctctgcacagcaatgaggc

SEQ ID NO: 13145 - DNA, 25 bp, synthetic construct
  source 1..25: mol_type = other DNA; mol_type = other DNA
cagcttctctgcacagcaagtaggc

SEQ ID NO: 13146 - DNA, 25 bp, synthetic construct
  source 1..25: mol_type = other DNA; mol_type = other DNA
cagcttctctgcacagcaaggatgc

SEQ ID NO: 13147 - DNA, 25 bp, synthetic construct
  source 1..25: mol_type = other DNA; mol_type = other DNA
cagcttctctgcacagcaaggagtc

SEQ ID NO: 13148 - DNA, 25 bp, synthetic construct
  source 1..25: mol_type = other DNA; mol_type = other DNA
cagcttctctgcacagcaaggaggt

SEQ ID NO: 13149 - DNA, 25 bp, synthetic construct
  source 1..25: mol_type = other DNA; mol_type = other DNA
tcagcttctctgcacagcaaggagg

SEQ ID NO: 13150 - DNA, 25 bp, synthetic construct
  source 1..25: mol_type = other DNA; mol_type = other DNA
ctagcttctctgcacagcaaggagg

SEQ ID NO: 13151 - DNA, 25 bp, synthetic construct
  source 1..25: mol_type = other DNA; mol_type = other DNA
ccatcttctctgcacagcaaggagg

SEQ ID NO: 13152 - DNA, 25 bp, synthetic construct
  source 1..25: mol_type = other DNA; mol_type = other DNA
ccagtttctctgcacagcaaggagg

SEQ ID NO: 13153 - DNA, 25 bp, synthetic construct
  source 1..25: mol_type = other DNA; mol_type = other DNA
ccagcttttctgcacagcaaggagg

SEQ ID NO: 13154 - DNA, 25 bp, synthetic construct
  source 1..25: mol_type = other DNA; mol_type = other DNA
ccagcttctttgcacagcaaggagg

SEQ ID NO: 13155 - DNA, 25 bp, synthetic construct
  source 1..25: mol_type = other DNA; mol_type = other DNA
ccagcttctcttcacagcaaggagg

SEQ ID NO: 13156 - DNA, 25 bp, synthetic construct
  source 1..25: mol_type = other DNA; mol_type = other DNA
ccagcttctctgtacagcaaggagg

SEQ ID NO: 13157 - DNA, 25 bp, synthetic construct
  source 1..25: mol_type = other DNA; mol_type = other DNA
ccagcttctctgcatagcaaggagg

SEQ ID NO: 13158 - DNA, 25 bp, synthetic construct
  source 1..25: mol_type = other DNA; mol_type = other DNA
ccagcttctctgcacatcaaggagg

SEQ ID NO: 13159 - DNA, 25 bp, synthetic construct
  source 1..25: mol_type = other DNA; mol_type = other DNA
ccagcttctctgcacagtaaggagg

SEQ ID NO: 13160 - DNA, 25 bp, synthetic construct
  source 1..25: mol_type = other DNA; mol_type = other DNA
ccagcttctctgcacagcaatgagg

SEQ ID NO: 13161 - DNA, 25 bp, synthetic construct
  source 1..25: mol_type = other DNA; mol_type = other DNA
ccagcttctctgcacagcaagtagg

SEQ ID NO: 13162 - DNA, 25 bp, synthetic construct
  source 1..25: mol_type = other DNA; mol_type = other DNA
ccagcttctctgcacagcaaggatg

SEQ ID NO: 13163 - DNA, 25 bp, synthetic construct
  source 1..25: mol_type = other DNA; mol_type = other DNA
ttcagcttctctgcacagcaaggag

SEQ ID NO: 13164 - DNA, 25 bp, synthetic construct
  source 1..25: mol_type = other DNA; mol_type = other DNA
tctagcttctctgcacagcaaggag

SEQ ID NO: 13165 - DNA, 25 bp, synthetic construct
  source 1..25: mol_type = other DNA; mol_type = other DNA
tccatcttctctgcacagcaaggag

SEQ ID NO: 13166 - DNA, 25 bp, synthetic construct
  source 1..25: mol_type = other DNA; mol_type = other DNA
tccagtttctctgcacagcaaggag

SEQ ID NO: 13167 - DNA, 25 bp, synthetic construct
  source 1..25: mol_type = other DNA; mol_type = other DNA
tccagcttttctgcacagcaaggag

SEQ ID NO: 13168 - DNA, 25 bp, synthetic construct
  source 1..25: mol_type = other DNA; mol_type = other DNA
tccagcttctttgcacagcaaggag

SEQ ID NO: 13169 - DNA, 25 bp, synthetic construct
  source 1..25: mol_type = other DNA; mol_type = other DNA
tccagcttctcttcacagcaaggag

SEQ ID NO: 13170 - DNA, 25 bp, synthetic construct
  source 1..25: mol_type = other DNA; mol_type = other DNA
tccagcttctctgtacagcaaggag

SEQ ID NO: 13171 - DNA, 25 bp, synthetic construct
  source 1..25: mol_type = other DNA; mol_type = other DNA
tccagcttctctgcatagcaaggag

SEQ ID NO: 13172 - DNA, 25 bp, synthetic construct
  source 1..25: mol_type = other DNA; mol_type = other DNA
tccagcttctctgcacatcaaggag

SEQ ID NO: 13173 - DNA, 25 bp, synthetic construct
  source 1..25: mol_type = other DNA; mol_type = other DNA
tccagcttctctgcacagtaaggag

SEQ ID NO: 13174 - DNA, 25 bp, synthetic construct
  source 1..25: mol_type = other DNA; mol_type = other DNA
tccagcttctctgcacagcaatgag

SEQ ID NO: 13175 - DNA, 25 bp, synthetic construct
  source 1..25: mol_type = other DNA; mol_type = other DNA
tccagcttctctgcacagcaagtag

SEQ ID NO: 13176 - DNA, 25 bp, synthetic construct
  source 1..25: mol_type = other DNA; mol_type = other DNA
ttccagcttctctgcacagcaagga

SEQ ID NO: 13177 - DNA, 25 bp, synthetic construct
  source 1..25: mol_type = other DNA; mol_type = other DNA
gttcagcttctctgcacagcaagga

SEQ ID NO: 13178 - DNA, 25 bp, synthetic construct
  source 1..25: mol_type = other DNA; mol_type = other DNA
gtctagcttctctgcacagcaagga

SEQ ID NO: 13179 - DNA, 25 bp, synthetic construct
  source 1..25: mol_type = other DNA; mol_type = other DNA
gtccatcttctctgcacagcaagga

SEQ ID NO: 13180 - DNA, 25 bp, synthetic construct
  source 1..25: mol_type = other DNA; mol_type = other DNA
gtccagtttctctgcacagcaagga

SEQ ID NO: 13181 - DNA, 25 bp, synthetic construct
  source 1..25: mol_type = other DNA; mol_type = other DNA
gtccagcttttctgcacagcaagga

SEQ ID NO: 13182 - DNA, 25 bp, synthetic construct
  source 1..25: mol_type = other DNA; mol_type = other DNA
gtccagcttctttgcacagcaagga

SEQ ID NO: 13183 - DNA, 25 bp, synthetic construct
  source 1..25: mol_type = other DNA; mol_type = other DNA
gtccagcttctcttcacagcaagga

SEQ ID NO: 13184 - DNA, 25 bp, synthetic construct
  source 1..25: mol_type = other DNA; mol_type = other DNA
gtccagcttctctgtacagcaagga

SEQ ID NO: 13185 - DNA, 25 bp, synthetic construct
  source 1..25: mol_type = other DNA; mol_type = other DNA
gtccagcttctctgcatagcaagga

SEQ ID NO: 13186 - DNA, 25 bp, synthetic construct
  source 1..25: mol_type = other DNA; mol_type = other DNA
gtccagcttctctgcacatcaagga

SEQ ID NO: 13187 - DNA, 25 bp, synthetic construct
  source 1..25: mol_type = other DNA; mol_type = other DNA
gtccagcttctctgcacagtaagga

SEQ ID NO: 13188 - DNA, 25 bp, synthetic construct
  source 1..25: mol_type = other DNA; mol_type = other DNA
gtccagcttctctgcacagcaatga

SEQ ID NO: 13189 - DNA, 25 bp, synthetic construct
  source 1..25: mol_type = other DNA; mol_type = other DNA
gtccagcttctctgcacagcaagta

SEQ ID NO: 13190 - DNA, 25 bp, synthetic construct
  source 1..25: mol_type = other DNA; mol_type = other DNA
agtccagcttctctgcacagcaagg

SEQ ID NO: 13191 - DNA, 25 bp, synthetic construct
  source 1..25: mol_type = other DNA; mol_type = other DNA
catccagcttctctgcacagcaagg

SEQ ID NO: 13192 - DNA, 25 bp, synthetic construct
  source 1..25: mol_type = other DNA; mol_type = other DNA
cgtacagcttctctgcacagcaagg

SEQ ID NO: 13193 - DNA, 25 bp, synthetic construct
  source 1..25: mol_type = other DNA; mol_type = other DNA
cgtcaagcttctctgcacagcaagg

SEQ ID NO: 13194 - DNA, 25 bp, synthetic construct
  source 1..25: mol_type = other DNA; mol_type = other DNA
cgtccaacttctctgcacagcaagg

SEQ ID NO: 13195 - DNA, 25 bp, synthetic construct
  source 1..25: mol_type = other DNA; mol_type = other DNA
cgtccagattctctgcacagcaagg

SEQ ID NO: 13196 - DNA, 25 bp, synthetic construct
  source 1..25: mol_type = other DNA; mol_type = other DNA
cgtccagcttatctgcacagcaagg

SEQ ID NO: 13197 - DNA, 25 bp, synthetic construct
  source 1..25: mol_type = other DNA; mol_type = other DNA
cgtccagcttctatgcacagcaagg

SEQ ID NO: 13198 - DNA, 25 bp, synthetic construct
  source 1..25: mol_type = other DNA; mol_type = other DNA
cgtccagcttctctacacagcaagg

SEQ ID NO: 13199 - DNA, 25 bp, synthetic construct
  source 1..25: mol_type = other DNA; mol_type = other DNA
cgtccagcttctctgaacagcaagg

SEQ ID NO: 13200 - DNA, 25 bp, synthetic construct
  source 1..25: mol_type = other DNA; mol_type = other DNA
cgtccagcttctctgcaaagcaagg

SEQ ID NO: 13201 - DNA, 25 bp, synthetic construct
  source 1..25: mol_type = other DNA; mol_type = other DNA
cgtccagcttctctgcacaacaagg

SEQ ID NO: 13202 - DNA, 25 bp, synthetic construct
  source 1..25: mol_type = other DNA; mol_type = other DNA
cgtccagcttctctgcacagaaagg

SEQ ID NO: 13203 - DNA, 25 bp, synthetic construct
  source 1..25: mol_type = other DNA; mol_type = other DNA
cgtccagcttctctgcacagcaaag

SEQ ID NO: 13204 - DNA, 25 bp, synthetic construct
  source 1..25: mol_type = other DNA; mol_type = other DNA
tagtccagcttctctgcacagcaag

SEQ ID NO: 13205 - DNA, 25 bp, synthetic construct
  source 1..25: mol_type = other DNA; mol_type = other DNA
tcatccagcttctctgcacagcaag

SEQ ID NO: 13206 - DNA, 25 bp, synthetic construct
  source 1..25: mol_type = other DNA; mol_type = other DNA
tcgtacagcttctctgcacagcaag

SEQ ID NO: 13207 - DNA, 25 bp, synthetic construct
  source 1..25: mol_type = other DNA; mol_type = other DNA
tcgtcaagcttctctgcacagcaag

SEQ ID NO: 13208 - DNA, 25 bp, synthetic construct
  source 1..25: mol_type = other DNA; mol_type = other DNA
tcgtccaacttctctgcacagcaag

SEQ ID NO: 13209 - DNA, 25 bp, synthetic construct
  source 1..25: mol_type = other DNA; mol_type = other DNA
tcgtccagattctctgcacagcaag

SEQ ID NO: 13210 - DNA, 25 bp, synthetic construct
  source 1..25: mol_type = other DNA; mol_type = other DNA
tcgtccagcttatctgcacagcaag

SEQ ID NO: 13211 - DNA, 25 bp, synthetic construct
  source 1..25: mol_type = other DNA; mol_type = other DNA
tcgtccagcttctatgcacagcaag

SEQ ID NO: 13212 - DNA, 25 bp, synthetic construct
  source 1..25: mol_type = other DNA; mol_type = other DNA
tcgtccagcttctctacacagcaag

SEQ ID NO: 13213 - DNA, 25 bp, synthetic construct
  source 1..25: mol_type = other DNA; mol_type = other DNA
tcgtccagcttctctgaacagcaag

SEQ ID NO: 13214 - DNA, 25 bp, synthetic construct
  source 1..25: mol_type = other DNA; mol_type = other DNA
tcgtccagcttctctgcaaagcaag

SEQ ID NO: 13215 - DNA, 25 bp, synthetic construct
  source 1..25: mol_type = other DNA; mol_type = other DNA
tcgtccagcttctctgcacaacaag

SEQ ID NO: 13216 - DNA, 25 bp, synthetic construct
  source 1..25: mol_type = other DNA; mol_type = other DNA
tcgtccagcttctctgcacagaaag

SEQ ID NO: 13217 - DNA, 25 bp, synthetic construct
  source 1..25: mol_type = other DNA; mol_type = other DNA
atcgtccagcttctctgcacagcaa

SEQ ID NO: 13218 - DNA, 25 bp, synthetic construct
  source 1..25: mol_type = other DNA; mol_type = other DNA
ctagtccagcttctctgcacagcaa

SEQ ID NO: 13219 - DNA, 25 bp, synthetic construct
  source 1..25: mol_type = other DNA; mol_type = other DNA
ctcatccagcttctctgcacagcaa

SEQ ID NO: 13220 - DNA, 25 bp, synthetic construct
  source 1..25: mol_type = other DNA; mol_type = other DNA
ctcgtacagcttctctgcacagcaa

SEQ ID NO: 13221 - DNA, 25 bp, synthetic construct
  source 1..25: mol_type = other DNA; mol_type = other DNA
ctcgtcaagcttctctgcacagcaa

SEQ ID NO: 13222 - DNA, 25 bp, synthetic construct
  source 1..25: mol_type = other DNA; mol_type = other DNA
ctcgtccaacttctctgcacagcaa

SEQ ID NO: 13223 - DNA, 25 bp, synthetic construct
  source 1..25: mol_type = other DNA; mol_type = other DNA
ctcgtccagattctctgcacagcaa

SEQ ID NO: 13224 - DNA, 25 bp, synthetic construct
  source 1..25: mol_type = other DNA; mol_type = other DNA
ctcgtccagcttatctgcacagcaa

SEQ ID NO: 13225 - DNA, 25 bp, synthetic construct
  source 1..25: mol_type = other DNA; mol_type = other DNA
ctcgtccagcttctatgcacagcaa

SEQ ID NO: 13226 - DNA, 25 bp, synthetic construct
  source 1..25: mol_type = other DNA; mol_type = other DNA
ctcgtccagcttctctacacagcaa

SEQ ID NO: 13227 - DNA, 25 bp, synthetic construct
  source 1..25: mol_type = other DNA; mol_type = other DNA
ctcgtccagcttctctgaacagcaa

SEQ ID NO: 13228 - DNA, 25 bp, synthetic construct
  source 1..25: mol_type = other DNA; mol_type = other DNA
ctcgtccagcttctctgcaaagcaa

SEQ ID NO: 13229 - DNA, 25 bp, synthetic construct
  source 1..25: mol_type = other DNA; mol_type = other DNA
ctcgtccagcttctctgcacagaaa

SEQ ID NO: 13230 - DNA, 25 bp, synthetic construct
  source 1..25: mol_type = other DNA; mol_type = other DNA
tatcgtccagcttctctgcacagca

SEQ ID NO: 13231 - DNA, 25 bp, synthetic construct
  source 1..25: mol_type = other DNA; mol_type = other DNA
tctagtccagcttctctgcacagca

SEQ ID NO: 13232 - DNA, 25 bp, synthetic construct
  source 1..25: mol_type = other DNA; mol_type = other DNA
tctcatccagcttctctgcacagca

SEQ ID NO: 13233 - DNA, 25 bp, synthetic construct
  source 1..25: mol_type = other DNA; mol_type = other DNA
tctcgtacagcttctctgcacagca

SEQ ID NO: 13234 - DNA, 25 bp, synthetic construct
  source 1..25: mol_type = other DNA; mol_type = other DNA
tctcgtcaagcttctctgcacagca

SEQ ID NO: 13235 - DNA, 25 bp, synthetic construct
  source 1..25: mol_type = other DNA; mol_type = other DNA
tctcgtccaacttctctgcacagca

SEQ ID NO: 13236 - DNA, 25 bp, synthetic construct
  source 1..25: mol_type = other DNA; mol_type = other DNA
tctcgtccagattctctgcacagca

SEQ ID NO: 13237 - DNA, 25 bp, synthetic construct
  source 1..25: mol_type = other DNA; mol_type = other DNA
tctcgtccagcttatctgcacagca

SEQ ID NO: 13238 - DNA, 25 bp, synthetic construct
  source 1..25: mol_type = other DNA; mol_type = other DNA
tctcgtccagcttctatgcacagca

SEQ ID NO: 13239 - DNA, 25 bp, synthetic construct
  source 1..25: mol_type = other DNA; mol_type = other DNA
tctcgtccagcttctctacacagca

SEQ ID NO: 13240 - DNA, 25 bp, synthetic construct
  source 1..25: mol_type = other DNA; mol_type = other DNA
tctcgtccagcttctctgaacagca

SEQ ID NO: 13241 - DNA, 25 bp, synthetic construct
  source 1..25: mol_type = other DNA; mol_type = other DNA
tctcgtccagcttctctgcaaagca

SEQ ID NO: 13242 - DNA, 25 bp, synthetic construct
  source 1..25: mol_type = other DNA; mol_type = other DNA
tctcgtccagcttctctgcacagaa

SEQ ID NO: 13243 - DNA, 25 bp, synthetic construct
  source 1..25: mol_type = other DNA; mol_type = other DNA
atatcgtccagcttctctgcacagc

SEQ ID NO: 13244 - DNA, 25 bp, synthetic construct
  source 1..25: mol_type = other DNA; mol_type = other DNA
atctagtccagcttctctgcacagc

SEQ ID NO: 13245 - DNA, 25 bp, synthetic construct
  source 1..25: mol_type = other DNA; mol_type = other DNA
atctcatccagcttctctgcacagc

SEQ ID NO: 13246 - DNA, 25 bp, synthetic construct
  source 1..25: mol_type = other DNA; mol_type = other DNA
atctcgtacagcttctctgcacagc

SEQ ID NO: 13247 - DNA, 25 bp, synthetic construct
  source 1..25: mol_type = other DNA; mol_type = other DNA
atctcgtcaagcttctctgcacagc

SEQ ID NO: 13248 - DNA, 25 bp, synthetic construct
  source 1..25: mol_type = other DNA; mol_type = other DNA
atctcgtccaacttctctgcacagc

SEQ ID NO: 13249 - DNA, 25 bp, synthetic construct
  source 1..25: mol_type = other DNA; mol_type = other DNA
atctcgtccagattctctgcacagc

SEQ ID NO: 13250 - DNA, 25 bp, synthetic construct
  source 1..25: mol_type = other DNA; mol_type = other DNA
atctcgtccagcttatctgcacagc

SEQ ID NO: 13251 - DNA, 25 bp, synthetic construct
  source 1..25: mol_type = other DNA; mol_type = other DNA
atctcgtccagcttctatgcacagc

SEQ ID NO: 13252 - DNA, 25 bp, synthetic construct
  source 1..25: mol_type = other DNA; mol_type = other DNA
atctcgtccagcttctctacacagc

SEQ ID NO: 13253 - DNA, 25 bp, synthetic construct
  source 1..25: mol_type = other DNA; mol_type = other DNA
atctcgtccagcttctctgaacagc

SEQ ID NO: 13254 - DNA, 25 bp, synthetic construct
  source 1..25: mol_type = other DNA; mol_type = other DNA
atctcgtccagcttctctgcaaagc

SEQ ID NO: 13255 - DNA, 25 bp, synthetic construct
  source 1..25: mol_type = other DNA; mol_type = other DNA
atctcgtccagcttctctgcacaga

SEQ ID NO: 13256 - DNA, 25 bp, synthetic construct
  source 1..25: mol_type = other DNA; mol_type = other DNA
aatctcgtccagcttctctgcacag

SEQ ID NO: 13257 - DNA, 25 bp, synthetic construct
  source 1..25: mol_type = other DNA; mol_type = other DNA
catatcgtccagcttctctgcacag

SEQ ID NO: 13258 - DNA, 25 bp, synthetic construct
  source 1..25: mol_type = other DNA; mol_type = other DNA
catctagtccagcttctctgcacag

SEQ ID NO: 13259 - DNA, 25 bp, synthetic construct
  source 1..25: mol_type = other DNA; mol_type = other DNA
catctcatccagcttctctgcacag

SEQ ID NO: 13260 - DNA, 25 bp, synthetic construct
  source 1..25: mol_type = other DNA; mol_type = other DNA
catctcgtacagcttctctgcacag

SEQ ID NO: 13261 - DNA, 25 bp, synthetic construct
  source 1..25: mol_type = other DNA; mol_type = other DNA
catctcgtcaagcttctctgcacag

SEQ ID NO: 13262 - DNA, 25 bp, synthetic construct
  source 1..25: mol_type = other DNA; mol_type = other DNA
catctcgtccaacttctctgcacag

SEQ ID NO: 13263 - DNA, 25 bp, synthetic construct
  source 1..25: mol_type = other DNA; mol_type = other DNA
catctcgtccagattctctgcacag

SEQ ID NO: 13264 - DNA, 25 bp, synthetic construct
  source 1..25: mol_type = other DNA; mol_type = other DNA
catctcgtccagcttatctgcacag

SEQ ID NO: 13265 - DNA, 25 bp, synthetic construct
  source 1..25: mol_type = other DNA; mol_type = other DNA
catctcgtccagcttctatgcacag

SEQ ID NO: 13266 - DNA, 25 bp, synthetic construct
  source 1..25: mol_type = other DNA; mol_type = other DNA
catctcgtccagcttctctacacag

SEQ ID NO: 13267 - DNA, 25 bp, synthetic construct
  source 1..25: mol_type = other DNA; mol_type = other DNA
catctcgtccagcttctctgaacag

SEQ ID NO: 13268 - DNA, 25 bp, synthetic construct
  source 1..25: mol_type = other DNA; mol_type = other DNA
catctcgtccagcttctctgcaaag

SEQ ID NO: 13269 - DNA, 25 bp, synthetic construct
  source 1..25: mol_type = other DNA; mol_type = other DNA
acatctcgtccagcttctctgcaca

SEQ ID NO: 13270 - DNA, 25 bp, synthetic construct
  source 1..25: mol_type = other DNA; mol_type = other DNA
gaatctcgtccagcttctctgcaca

SEQ ID NO: 13271 - DNA, 25 bp, synthetic construct
  source 1..25: mol_type = other DNA; mol_type = other DNA
gcatatcgtccagcttctctgcaca

SEQ ID NO: 13272 - DNA, 25 bp, synthetic construct
  source 1..25: mol_type = other DNA; mol_type = other DNA
gcatctagtccagcttctctgcaca

SEQ ID NO: 13273 - DNA, 25 bp, synthetic construct
  source 1..25: mol_type = other DNA; mol_type = other DNA
gcatctcatccagcttctctgcaca

SEQ ID NO: 13274 - DNA, 25 bp, synthetic construct
  source 1..25: mol_type = other DNA; mol_type = other DNA
gcatctcgtacagcttctctgcaca

SEQ ID NO: 13275 - DNA, 25 bp, synthetic construct
  source 1..25: mol_type = other DNA; mol_type = other DNA
gcatctcgtcaagcttctctgcaca

SEQ ID NO: 13276 - DNA, 25 bp, synthetic construct
  source 1..25: mol_type = other DNA; mol_type = other DNA
gcatctcgtccaacttctctgcaca

SEQ ID NO: 13277 - DNA, 25 bp, synthetic construct
  source 1..25: mol_type = other DNA; mol_type = other DNA
gcatctcgtccagattctctgcaca

SEQ ID NO: 13278 - DNA, 25 bp, synthetic construct
  source 1..25: mol_type = other DNA; mol_type = other DNA
gcatctcgtccagcttatctgcaca

SEQ ID NO: 13279 - DNA, 25 bp, synthetic construct
  source 1..25: mol_type = other DNA; mol_type = other DNA
gcatctcgtccagcttctatgcaca

SEQ ID NO: 13280 - DNA, 25 bp, synthetic construct
  source 1..25: mol_type = other DNA; mol_type = other DNA
gcatctcgtccagcttctctgaaca

SEQ ID NO: 13281 - DNA, 25 bp, synthetic construct
  source 1..25: mol_type = other DNA; mol_type = other DNA
gcatctcgtccagcttctctgcaaa

SEQ ID NO: 13282 - DNA, 25 bp, synthetic construct
  source 1..25: mol_type = other DNA; mol_type = other DNA
aacatctcgtccagcttctctgcac

SEQ ID NO: 13283 - DNA, 25 bp, synthetic construct
  source 1..25: mol_type = other DNA; mol_type = other DNA
agaatctcgtccagcttctctgcac

SEQ ID NO: 13284 - DNA, 25 bp, synthetic construct
  source 1..25: mol_type = other DNA; mol_type = other DNA
agcatatcgtccagcttctctgcac

SEQ ID NO: 13285 - DNA, 25 bp, synthetic construct
  source 1..25: mol_type = other DNA; mol_type = other DNA
agcatctagtccagcttctctgcac

SEQ ID NO: 13286 - DNA, 25 bp, synthetic construct
  source 1..25: mol_type = other DNA; mol_type = other DNA
agcatctcatccagcttctctgcac

SEQ ID NO: 13287 - DNA, 25 bp, synthetic construct
  source 1..25: mol_type = other DNA; mol_type = other DNA
agcatctcgtacagcttctctgcac

SEQ ID NO: 13288 - DNA, 25 bp, synthetic construct
  source 1..25: mol_type = other DNA; mol_type = other DNA
agcatctcgtcaagcttctctgcac

SEQ ID NO: 13289 - DNA, 25 bp, synthetic construct
  source 1..25: mol_type = other DNA; mol_type = other DNA
agcatctcgtccaacttctctgcac

SEQ ID NO: 13290 - DNA, 25 bp, synthetic construct
  source 1..25: mol_type = other DNA; mol_type = other DNA
agcatctcgtccagattctctgcac

SEQ ID NO: 13291 - DNA, 25 bp, synthetic construct
  source 1..25: mol_type = other DNA; mol_type = other DNA
agcatctcgtccagcttatctgcac

SEQ ID NO: 13292 - DNA, 25 bp, synthetic construct
  source 1..25: mol_type = other DNA; mol_type = other DNA
agcatctcgtccagcttctatgcac

SEQ ID NO: 13293 - DNA, 25 bp, synthetic construct
  source 1..25: mol_type = other DNA; mol_type = other DNA
agcatctcgtccagcttctctgaac

SEQ ID NO: 13294 - DNA, 25 bp, synthetic construct
  source 1..25: mol_type = other DNA; mol_type = other DNA
agcatctcgtccagcttctctgcaa

SEQ ID NO: 13295 - DNA, 25 bp, synthetic construct
  source 1..25: mol_type = other DNA; mol_type = other DNA
aagcatctcgtccagcttctctgca

SEQ ID NO: 13296 - DNA, 25 bp, synthetic construct
  source 1..25: mol_type = other DNA; mol_type = other DNA
caacatctcgtccagcttctctgca

SEQ ID NO: 13297 - DNA, 25 bp, synthetic construct
  source 1..25: mol_type = other DNA; mol_type = other DNA
cagaatctcgtccagcttctctgca

SEQ ID NO: 13298 - DNA, 25 bp, synthetic construct
  source 1..25: mol_type = other DNA; mol_type = other DNA
cagcatatcgtccagcttctctgca

SEQ ID NO: 13299 - DNA, 25 bp, synthetic construct
  source 1..25: mol_type = other DNA; mol_type = other DNA
cagcatctagtccagcttctctgca

SEQ ID NO: 13300 - DNA, 25 bp, synthetic construct
  source 1..25: mol_type = other DNA; mol_type = other DNA
cagcatctcatccagcttctctgca

SEQ ID NO: 13301 - DNA, 25 bp, synthetic construct
  source 1..25: mol_type = other DNA; mol_type = other DNA
cagcatctcgtacagcttctctgca

SEQ ID NO: 13302 - DNA, 25 bp, synthetic construct
  source 1..25: mol_type = other DNA; mol_type = other DNA
cagcatctcgtcaagcttctctgca

SEQ ID NO: 13303 - DNA, 25 bp, synthetic construct
  source 1..25: mol_type = other DNA; mol_type = other DNA
cagcatctcgtccaacttctctgca

SEQ ID NO: 13304 - DNA, 25 bp, synthetic construct
  source 1..25: mol_type = other DNA; mol_type = other DNA
cagcatctcgtccagattctctgca

SEQ ID NO: 13305 - DNA, 25 bp, synthetic construct
  source 1..25: mol_type = other DNA; mol_type = other DNA
cagcatctcgtccagcttatctgca

SEQ ID NO: 13306 - DNA, 25 bp, synthetic construct
  source 1..25: mol_type = other DNA; mol_type = other DNA
cagcatctcgtccagcttctatgca

SEQ ID NO: 13307 - DNA, 25 bp, synthetic construct
  source 1..25: mol_type = other DNA; mol_type = other DNA
cagcatctcgtccagcttctctgaa

SEQ ID NO: 13308 - DNA, 25 bp, synthetic construct
  source 1..25: mol_type = other DNA; mol_type = other DNA
acagcatctcgtccagcttctctgc

SEQ ID NO: 13309 - DNA, 25 bp, synthetic construct
  source 1..25: mol_type = other DNA; mol_type = other DNA
caagcatctcgtccagcttctctgc

SEQ ID NO: 13310 - DNA, 25 bp, synthetic construct
  source 1..25: mol_type = other DNA; mol_type = other DNA
ccaacatctcgtccagcttctctgc

SEQ ID NO: 13311 - DNA, 25 bp, synthetic construct
  source 1..25: mol_type = other DNA; mol_type = other DNA
ccagaatctcgtccagcttctctgc

SEQ ID NO: 13312 - DNA, 25 bp, synthetic construct
  source 1..25: mol_type = other DNA; mol_type = other DNA
ccagcatatcgtccagcttctctgc

SEQ ID NO: 13313 - DNA, 25 bp, synthetic construct
  source 1..25: mol_type = other DNA; mol_type = other DNA
ccagcatctagtccagcttctctgc

SEQ ID NO: 13314 - DNA, 25 bp, synthetic construct
  source 1..25: mol_type = other DNA; mol_type = other DNA
ccagcatctcatccagcttctctgc

SEQ ID NO: 13315 - DNA, 25 bp, synthetic construct
  source 1..25: mol_type = other DNA; mol_type = other DNA
ccagcatctcgtacagcttctctgc

SEQ ID NO: 13316 - DNA, 25 bp, synthetic construct
  source 1..25: mol_type = other DNA; mol_type = other DNA
ccagcatctcgtcaagcttctctgc

SEQ ID NO: 13317 - DNA, 25 bp, synthetic construct
  source 1..25: mol_type = other DNA; mol_type = other DNA
ccagcatctcgtccaacttctctgc

SEQ ID NO: 13318 - DNA, 25 bp, synthetic construct
  source 1..25: mol_type = other DNA; mol_type = other DNA
ccagcatctcgtccagattctctgc

SEQ ID NO: 13319 - DNA, 25 bp, synthetic construct
  source 1..25: mol_type = other DNA; mol_type = other DNA
ccagcatctcgtccagcttatctgc

SEQ ID NO: 13320 - DNA, 25 bp, synthetic construct
  source 1..25: mol_type = other DNA; mol_type = other DNA
ccagcatctcgtccagcttctatgc

SEQ ID NO: 13321 - DNA, 25 bp, synthetic construct
  source 1..25: mol_type = other DNA; mol_type = other DNA
ccagcatctcgtccagcttctctga

SEQ ID NO: 13322 - DNA, 25 bp, synthetic construct
  source 1..25: mol_type = other DNA; mol_type = other DNA
accagcatctcgtccagcttctctg

SEQ ID NO: 13323 - DNA, 25 bp, synthetic construct
  source 1..25: mol_type = other DNA; mol_type = other DNA
gacagcatctcgtccagcttctctg

SEQ ID NO: 13324 - DNA, 25 bp, synthetic construct
  source 1..25: mol_type = other DNA; mol_type = other DNA
gcaagcatctcgtccagcttctctg

SEQ ID NO: 13325 - DNA, 25 bp, synthetic construct
  source 1..25: mol_type = other DNA; mol_type = other DNA
gccaacatctcgtccagcttctctg

SEQ ID NO: 13326 - DNA, 25 bp, synthetic construct
  source 1..25: mol_type = other DNA; mol_type = other DNA
gccagaatctcgtccagcttctctg

SEQ ID NO: 13327 - DNA, 25 bp, synthetic construct
  source 1..25: mol_type = other DNA; mol_type = other DNA
gccagcatatcgtccagcttctctg

SEQ ID NO: 13328 - DNA, 25 bp, synthetic construct
  source 1..25: mol_type = other DNA; mol_type = other DNA
gccagcatctagtccagcttctctg

SEQ ID NO: 13329 - DNA, 25 bp, synthetic construct
  source 1..25: mol_type = other DNA; mol_type = other DNA
gccagcatctcatccagcttctctg

SEQ ID NO: 13330 - DNA, 25 bp, synthetic construct
  source 1..25: mol_type = other DNA; mol_type = other DNA
gccagcatctcgtacagcttctctg

SEQ ID NO: 13331 - DNA, 25 bp, synthetic construct
  source 1..25: mol_type = other DNA; mol_type = other DNA
gccagcatctcgtcaagcttctctg

SEQ ID NO: 13332 - DNA, 25 bp, synthetic construct
  source 1..25: mol_type = other DNA; mol_type = other DNA
gccagcatctcgtccaacttctctg

SEQ ID NO: 13333 - DNA, 25 bp, synthetic construct
  source 1..25: mol_type = other DNA; mol_type = other DNA
gccagcatctcgtccagattctctg

SEQ ID NO: 13334 - DNA, 25 bp, synthetic construct
  source 1..25: mol_type = other DNA
gccagcatctcgtccagcttatctg

SEQ ID NO: 13335 - DNA, 25 bp, synthetic construct
  source 1..25: mol_type = other DNA
gccagcatctcgtccagcttctatg

SEQ ID NO: 13336 - DNA, 25 bp, synthetic construct
  source 1..25: mol_type = other DNA
taccagcatctcgtccagcttctct

SEQ ID NO: 13337 - DNA, 25 bp, synthetic construct
  source 1..25: mol_type = other DNA
tgacagcatctcgtccagcttctct

SEQ ID NO: 13338 - DNA, 25 bp, synthetic construct
  source 1..25: mol_type = other DNA
tgcaagcatctcgtccagcttctct

SEQ ID NO: 13339 - DNA, 25 bp, synthetic construct
  source 1..25: mol_type = other DNA
tgccaacatctcgtccagcttctct

SEQ ID NO: 13340 - DNA, 25 bp, synthetic construct
  source 1..25: mol_type = other DNA
tgccagaatctcgtccagcttctct

SEQ ID NO: 13341 - DNA, 25 bp, synthetic construct
  source 1..25: mol_type = other DNA
tgccagcatatcgtccagcttctct

SEQ ID NO: 13342 - DNA, 25 bp, synthetic construct
  source 1..25: mol_type = other DNA
tgccagcatctagtccagcttctct

SEQ ID NO: 13343 - DNA, 25 bp, synthetic construct
  source 1..25: mol_type = other DNA
tgccagcatctcatccagcttctct

SEQ ID NO: 13344 - DNA, 25 bp, synthetic construct
  source 1..25: mol_type = other DNA
tgccagcatctcgtacagcttctct

SEQ ID NO: 13345 - DNA, 25 bp, synthetic construct
  source 1..25: mol_type = other DNA
tgccagcatctcgtcaagcttctct

SEQ ID NO: 13346 - DNA, 25 bp, synthetic construct
  source 1..25: mol_type = other DNA
tgccagcatctcgtccagattctct

SEQ ID NO: 13347 - DNA, 25 bp, synthetic construct
  source 1..25: mol_type = other DNA
tgccagcatctcgtccagcttatct

SEQ ID NO: 13348 - DNA, 25 bp, synthetic construct
  source 1..25: mol_type = other DNA
tgccagcatctcgtccagcttctat

SEQ ID NO: 13349 - DNA, 25 bp, synthetic construct
  source 1..25: mol_type = other DNA
atgccagcatctcgtccagcttctc

SEQ ID NO: 13350 - DNA, 25 bp, synthetic construct
  source 1..25: mol_type = other DNA
ctaccagcatctcgtccagcttctc

SEQ ID NO: 13351 - DNA, 25 bp, synthetic construct
  source 1..25: mol_type = other DNA
ctgacagcatctcgtccagcttctc

SEQ ID NO: 13352 - DNA, 25 bp, synthetic construct
  source 1..25: mol_type = other DNA
ctgcaagcatctcgtccagcttctc

SEQ ID NO: 13353 - DNA, 25 bp, synthetic construct
  source 1..25: mol_type = other DNA
ctgccaacatctcgtccagcttctc

SEQ ID NO: 13354 - DNA, 25 bp, synthetic construct
  source 1..25: mol_type = other DNA
ctgccagaatctcgtccagcttctc

SEQ ID NO: 13355 - DNA, 25 bp, synthetic construct
  source 1..25: mol_type = other DNA
ctgccagcatatcgtccagcttctc

SEQ ID NO: 13356 - DNA, 25 bp, synthetic construct
  source 1..25: mol_type = other DNA
ctgccagcatctagtccagcttctc

SEQ ID NO: 13357 - DNA, 25 bp, synthetic construct
  source 1..25: mol_type = other DNA
ctgccagcatctcatccagcttctc

SEQ ID NO: 13358 - DNA, 25 bp, synthetic construct
  source 1..25: mol_type = other DNA
ctgccagcatctcgtacagcttctc

SEQ ID NO: 13359 - DNA, 25 bp, synthetic construct
  source 1..25: mol_type = other DNA
ctgccagcatctcgtcaagcttctc

SEQ ID NO: 13360 - DNA, 25 bp, synthetic construct
  source 1..25: mol_type = other DNA
ctgccagcatctcgtccagattctc

SEQ ID NO: 13361 - DNA, 25 bp, synthetic construct
  source 1..25: mol_type = other DNA
ctgccagcatctcgtccagcttatc

SEQ ID NO: 13362 - DNA, 25 bp, synthetic construct
  source 1..25: mol_type = other DNA
ctgccagcatctcgtccagcttcta

SEQ ID NO: 13363 - DNA, 25 bp, synthetic construct
  source 1..25: mol_type = other DNA
actgccagcatctcgtccagcttct

SEQ ID NO: 13364 - DNA, 25 bp, synthetic construct
  source 1..25: mol_type = other DNA
gatgccagcatctcgtccagcttct

SEQ ID NO: 13365 - DNA, 25 bp, synthetic construct
  source 1..25: mol_type = other DNA
gctaccagcatctcgtccagcttct

SEQ ID NO: 13366 - DNA, 25 bp, synthetic construct
  source 1..25: mol_type = other DNA
gctgacagcatctcgtccagcttct

SEQ ID NO: 13367 - DNA, 25 bp, synthetic construct
  source 1..25: mol_type = other DNA
gctgcaagcatctcgtccagcttct

SEQ ID NO: 13368 - DNA, 25 bp, synthetic construct
  source 1..25: mol_type = other DNA
gctgccaacatctcgtccagcttct

SEQ ID NO: 13369 - DNA, 25 bp, synthetic construct
  source 1..25: mol_type = other DNA
gctgccagaatctcgtccagcttct

SEQ ID NO: 13370 - DNA, 25 bp, synthetic construct
  source 1..25: mol_type = other DNA
gctgccagcatatcgtccagcttct

SEQ ID NO: 13371 - DNA, 25 bp, synthetic construct
  source 1..25: mol_type = other DNA
gctgccagcatctagtccagcttct

SEQ ID NO: 13372 - DNA, 25 bp, synthetic construct
  source 1..25: mol_type = other DNA
gctgccagcatctcatccagcttct

SEQ ID NO: 13373 - DNA, 25 bp, synthetic construct
  source 1..25: mol_type = other DNA
gctgccagcatctcgtacagcttct

SEQ ID NO: 13374 - DNA, 25 bp, synthetic construct
  source 1..25: mol_type = other DNA
gctgccagcatctcgtcaagcttct

SEQ ID NO: 13375 - DNA, 25 bp, synthetic construct
  source 1..25: mol_type = other DNA
gctgccagcatctcgtccagattct

SEQ ID NO: 13376 - DNA, 25 bp, synthetic construct
  source 1..25: mol_type = other DNA
gctgccagcatctcgtccagcttat

SEQ ID NO: 13377 - DNA, 25 bp, synthetic construct
  source 1..25: mol_type = other DNA; mol_type = other DNA
agctgccagcatctcgtccagcttc

SEQ ID NO: 13378 - DNA, 25 bp, synthetic construct
  source 1..25: mol_type = other DNA; mol_type = other DNA
gactgccagcatctcgtccagcttc

SEQ ID NO: 13379 - DNA, 25 bp, synthetic construct
  source 1..25: mol_type = other DNA; mol_type = other DNA
ggatgccagcatctcgtccagcttc

SEQ ID NO: 13380 - DNA, 25 bp, synthetic construct
  source 1..25: mol_type = other DNA; mol_type = other DNA
ggctaccagcatctcgtccagcttc

SEQ ID NO: 13381 - DNA, 25 bp, synthetic construct
  source 1..25: mol_type = other DNA; mol_type = other DNA
ggctgacagcatctcgtccagcttc

SEQ ID NO: 13382 - DNA, 25 bp, synthetic construct
  source 1..25: mol_type = other DNA; mol_type = other DNA
ggctgcaagcatctcgtccagcttc

SEQ ID NO: 13383 - DNA, 25 bp, synthetic construct
  source 1..25: mol_type = other DNA; mol_type = other DNA
ggctgccaacatctcgtccagcttc

SEQ ID NO: 13384 - DNA, 25 bp, synthetic construct
  source 1..25: mol_type = other DNA; mol_type = other DNA
ggctgccagaatctcgtccagcttc

SEQ ID NO: 13385 - DNA, 25 bp, synthetic construct
  source 1..25: mol_type = other DNA; mol_type = other DNA
ggctgccagcatatcgtccagcttc

SEQ ID NO: 13386 - DNA, 25 bp, synthetic construct
  source 1..25: mol_type = other DNA; mol_type = other DNA
ggctgccagcatctagtccagcttc

SEQ ID NO: 13387 - DNA, 25 bp, synthetic construct
  source 1..25: mol_type = other DNA; mol_type = other DNA
ggctgccagcatctcatccagcttc

SEQ ID NO: 13388 - DNA, 25 bp, synthetic construct
  source 1..25: mol_type = other DNA; mol_type = other DNA
ggctgccagcatctcgtacagcttc

SEQ ID NO: 13389 - DNA, 25 bp, synthetic construct
  source 1..25: mol_type = other DNA; mol_type = other DNA
ggctgccagcatctcgtcaagcttc

SEQ ID NO: 13390 - DNA, 25 bp, synthetic construct
  source 1..25: mol_type = other DNA; mol_type = other DNA
ggctgccagcatctcgtccagattc

SEQ ID NO: 13391 - DNA, 25 bp, synthetic construct
  source 1..25: mol_type = other DNA; mol_type = other DNA
ggctgccagcatctcgtccagctta

SEQ ID NO: 13392 - DNA, 25 bp, synthetic construct
  source 1..25: mol_type = other DNA; mol_type = other DNA
aggctgccagcatctcgtccagctt

SEQ ID NO: 13393 - DNA, 25 bp, synthetic construct
  source 1..25: mol_type = other DNA; mol_type = other DNA
cagctgccagcatctcgtccagctt

SEQ ID NO: 13394 - DNA, 25 bp, synthetic construct
  source 1..25: mol_type = other DNA; mol_type = other DNA
cgactgccagcatctcgtccagctt

SEQ ID NO: 13395 - DNA, 25 bp, synthetic construct
  source 1..25: mol_type = other DNA; mol_type = other DNA
cggatgccagcatctcgtccagctt

SEQ ID NO: 13396 - DNA, 25 bp, synthetic construct
  source 1..25: mol_type = other DNA; mol_type = other DNA
cggctaccagcatctcgtccagctt

SEQ ID NO: 13397 - DNA, 25 bp, synthetic construct
  source 1..25: mol_type = other DNA; mol_type = other DNA
cggctgacagcatctcgtccagctt

SEQ ID NO: 13398 - DNA, 25 bp, synthetic construct
  source 1..25: mol_type = other DNA; mol_type = other DNA
cggctgcaagcatctcgtccagctt

SEQ ID NO: 13399 - DNA, 25 bp, synthetic construct
  source 1..25: mol_type = other DNA; mol_type = other DNA
cggctgccaacatctcgtccagctt

SEQ ID NO: 13400 - DNA, 25 bp, synthetic construct
  source 1..25: mol_type = other DNA; mol_type = other DNA
cggctgccagaatctcgtccagctt

SEQ ID NO: 13401 - DNA, 25 bp, synthetic construct
  source 1..25: mol_type = other DNA; mol_type = other DNA
cggctgccagcatatcgtccagctt

SEQ ID NO: 13402 - DNA, 25 bp, synthetic construct
  source 1..25: mol_type = other DNA; mol_type = other DNA
cggctgccagcatctagtccagctt

SEQ ID NO: 13403 - DNA, 25 bp, synthetic construct
  source 1..25: mol_type = other DNA; mol_type = other DNA
cggctgccagcatctcatccagctt

SEQ ID NO: 13404 - DNA, 25 bp, synthetic construct
  source 1..25: mol_type = other DNA; mol_type = other DNA
cggctgccagcatctcgtacagctt

SEQ ID NO: 13405 - DNA, 25 bp, synthetic construct
  source 1..25: mol_type = other DNA; mol_type = other DNA
cggctgccagcatctcgtcaagctt

SEQ ID NO: 13406 - DNA, 25 bp, synthetic construct
  source 1..25: mol_type = other DNA; mol_type = other DNA
cggctgccagcatctcgtccagatt

SEQ ID NO: 13407 - DNA, 25 bp, synthetic construct
  source 1..25: mol_type = other DNA; mol_type = other DNA
acggctgccagcatctcgtccagct

SEQ ID NO: 13408 - DNA, 25 bp, synthetic construct
  source 1..25: mol_type = other DNA; mol_type = other DNA
gaggctgccagcatctcgtccagct

SEQ ID NO: 13409 - DNA, 25 bp, synthetic construct
  source 1..25: mol_type = other DNA; mol_type = other DNA
gcagctgccagcatctcgtccagct

SEQ ID NO: 13410 - DNA, 25 bp, synthetic construct
  source 1..25: mol_type = other DNA; mol_type = other DNA
gcgactgccagcatctcgtccagct

SEQ ID NO: 13411 - DNA, 25 bp, synthetic construct
  source 1..25: mol_type = other DNA; mol_type = other DNA
gcggatgccagcatctcgtccagct

SEQ ID NO: 13412 - DNA, 25 bp, synthetic construct
  source 1..25: mol_type = other DNA; mol_type = other DNA
gcggctaccagcatctcgtccagct

SEQ ID NO: 13413 - DNA, 25 bp, synthetic construct
  source 1..25: mol_type = other DNA; mol_type = other DNA
gcggctgacagcatctcgtccagct

SEQ ID NO: 13414 - DNA, 25 bp, synthetic construct
  source 1..25: mol_type = other DNA; mol_type = other DNA
gcggctgcaagcatctcgtccagct

SEQ ID NO: 13415 - DNA, 25 bp, synthetic construct
  source 1..25: mol_type = other DNA; mol_type = other DNA
gcggctgccaacatctcgtccagct

SEQ ID NO: 13416 - DNA, 25 bp, synthetic construct
  source 1..25: mol_type = other DNA; mol_type = other DNA
gcggctgccagaatctcgtccagct

SEQ ID NO: 13417 - DNA, 25 bp, synthetic construct
  source 1..25: mol_type = other DNA; mol_type = other DNA
gcggctgccagcatatcgtccagct

SEQ ID NO: 13418 - DNA, 25 bp, synthetic construct
  source 1..25: mol_type = other DNA; mol_type = other DNA
gcggctgccagcatctagtccagct

SEQ ID NO: 13419 - DNA, 25 bp, synthetic construct
  source 1..25: mol_type = other DNA; mol_type = other DNA
gcggctgccagcatctcatccagct

SEQ ID NO: 13420 - DNA, 25 bp, synthetic construct
  source 1..25: mol_type = other DNA; mol_type = other DNA
gcggctgccagcatctcgtacagct

SEQ ID NO: 13421 - DNA, 25 bp, synthetic construct
  source 1..25: mol_type = other DNA; mol_type = other DNA
gcggctgccagcatctcgtcaagct

SEQ ID NO: 13422 - DNA, 25 bp, synthetic construct
  source 1..25: mol_type = other DNA; mol_type = other DNA
gcggctgccagcatctcgtccagat

SEQ ID NO: 13423 - DNA, 25 bp, synthetic construct
  source 1..25: mol_type = other DNA; mol_type = other DNA
agcggctgccagcatctcgtccagc

SEQ ID NO: 13424 - DNA, 25 bp, synthetic construct
  source 1..25: mol_type = other DNA; mol_type = other DNA
gacggctgccagcatctcgtccagc

SEQ ID NO: 13425 - DNA, 25 bp, synthetic construct
  source 1..25: mol_type = other DNA; mol_type = other DNA
ggaggctgccagcatctcgtccagc

SEQ ID NO: 13426 - DNA, 25 bp, synthetic construct
  source 1..25: mol_type = other DNA; mol_type = other DNA
ggcagctgccagcatctcgtccagc

SEQ ID NO: 13427 - DNA, 25 bp, synthetic construct
  source 1..25: mol_type = other DNA; mol_type = other DNA
ggcgactgccagcatctcgtccagc

SEQ ID NO: 13428 - DNA, 25 bp, synthetic construct
  source 1..25: mol_type = other DNA; mol_type = other DNA
ggcggatgccagcatctcgtccagc

SEQ ID NO: 13429 - DNA, 25 bp, synthetic construct
  source 1..25: mol_type = other DNA; mol_type = other DNA
ggcggctaccagcatctcgtccagc

SEQ ID NO: 13430 - DNA, 25 bp, synthetic construct
  source 1..25: mol_type = other DNA; mol_type = other DNA
ggcggctgacagcatctcgtccagc

SEQ ID NO: 13431 - DNA, 25 bp, synthetic construct
  source 1..25: mol_type = other DNA; mol_type = other DNA
ggcggctgcaagcatctcgtccagc

SEQ ID NO: 13432 - DNA, 25 bp, synthetic construct
  source 1..25: mol_type = other DNA; mol_type = other DNA
ggcggctgccaacatctcgtccagc

SEQ ID NO: 13433 - DNA, 25 bp, synthetic construct
  source 1..25: mol_type = other DNA; mol_type = other DNA
ggcggctgccagaatctcgtccagc

SEQ ID NO: 13434 - DNA, 25 bp, synthetic construct
  source 1..25: mol_type = other DNA; mol_type = other DNA
ggcggctgccagcatatcgtccagc

SEQ ID NO: 13435 - DNA, 25 bp, synthetic construct
  source 1..25: mol_type = other DNA; mol_type = other DNA
ggcggctgccagcatctagtccagc

SEQ ID NO: 13436 - DNA, 25 bp, synthetic construct
  source 1..25: mol_type = other DNA; mol_type = other DNA
ggcggctgccagcatctcatccagc

SEQ ID NO: 13437 - DNA, 25 bp, synthetic construct
  source 1..25: mol_type = other DNA; mol_type = other DNA
ggcggctgccagcatctcgtacagc

SEQ ID NO: 13438 - DNA, 25 bp, synthetic construct
  source 1..25: mol_type = other DNA; mol_type = other DNA
ggcggctgccagcatctcgtcaagc

SEQ ID NO: 13439 - DNA, 25 bp, synthetic construct
  source 1..25: mol_type = other DNA; mol_type = other DNA
ggcggctgccagcatctcgtccaga

SEQ ID NO: 13440 - DNA, 25 bp, synthetic construct
  source 1..25: mol_type = other DNA; mol_type = other DNA
aggcggctgccagcatctcgtccag

SEQ ID NO: 13441 - DNA, 25 bp, synthetic construct
  source 1..25: mol_type = other DNA; mol_type = other DNA
cagcggctgccagcatctcgtccag

SEQ ID NO: 13442 - DNA, 25 bp, synthetic construct
  source 1..25: mol_type = other DNA; mol_type = other DNA
cgacggctgccagcatctcgtccag

SEQ ID NO: 13443 - DNA, 25 bp, synthetic construct
  source 1..25: mol_type = other DNA; mol_type = other DNA
cggaggctgccagcatctcgtccag

SEQ ID NO: 13444 - DNA, 25 bp, synthetic construct
  source 1..25: mol_type = other DNA; mol_type = other DNA
cggcagctgccagcatctcgtccag

SEQ ID NO: 13445 - DNA, 25 bp, synthetic construct
  source 1..25: mol_type = other DNA; mol_type = other DNA
cggcgactgccagcatctcgtccag

SEQ ID NO: 13446 - DNA, 25 bp, synthetic construct
  source 1..25: mol_type = other DNA; mol_type = other DNA
cggcggatgccagcatctcgtccag

SEQ ID NO: 13447 - DNA, 25 bp, synthetic construct
  source 1..25: mol_type = other DNA; mol_type = other DNA
cggcggctaccagcatctcgtccag

SEQ ID NO: 13448 - DNA, 25 bp, synthetic construct
  source 1..25: mol_type = other DNA; mol_type = other DNA
cggcggctgacagcatctcgtccag

SEQ ID NO: 13449 - DNA, 25 bp, synthetic construct
  source 1..25: mol_type = other DNA; mol_type = other DNA
cggcggctgcaagcatctcgtccag

SEQ ID NO: 13450 - DNA, 25 bp, synthetic construct
  source 1..25: mol_type = other DNA; mol_type = other DNA
cggcggctgccaacatctcgtccag

SEQ ID NO: 13451 - DNA, 25 bp, synthetic construct
  source 1..25: mol_type = other DNA; mol_type = other DNA
cggcggctgccagaatctcgtccag

SEQ ID NO: 13452 - DNA, 25 bp, synthetic construct
  source 1..25: mol_type = other DNA; mol_type = other DNA
cggcggctgccagcatatcgtccag

SEQ ID NO: 13453 - DNA, 25 bp, synthetic construct
  source 1..25: mol_type = other DNA; mol_type = other DNA
cggcggctgccagcatctagtccag

SEQ ID NO: 13454 - DNA, 25 bp, synthetic construct
  source 1..25: mol_type = other DNA; mol_type = other DNA
cggcggctgccagcatctcatccag

SEQ ID NO: 13455 - DNA, 25 bp, synthetic construct
  source 1..25: mol_type = other DNA; mol_type = other DNA
cggcggctgccagcatctcgtacag

SEQ ID NO: 13456 - DNA, 25 bp, synthetic construct
  source 1..25: mol_type = other DNA; mol_type = other DNA
cggcggctgccagcatctcgtcaag

SEQ ID NO: 13457 - DNA, 25 bp, synthetic construct
  source 1..25: mol_type = other DNA; mol_type = other DNA
acggcggctgccagcatctcgtcca

SEQ ID NO: 13458 - DNA, 25 bp, synthetic construct
  source 1..25: mol_type = other DNA; mol_type = other DNA
gaggcggctgccagcatctcgtcca

SEQ ID NO: 13459 - DNA, 25 bp, synthetic construct
  source 1..25: mol_type = other DNA; mol_type = other DNA
gcagcggctgccagcatctcgtcca

SEQ ID NO: 13460 - DNA, 25 bp, synthetic construct
  source 1..25: mol_type = other DNA; mol_type = other DNA
gcgacggctgccagcatctcgtcca

SEQ ID NO: 13461 - DNA, 25 bp, synthetic construct
  source 1..25: mol_type = other DNA; mol_type = other DNA
gcggaggctgccagcatctcgtcca

SEQ ID NO: 13462 - DNA, 25 bp, synthetic construct
  source 1..25: mol_type = other DNA; mol_type = other DNA
gcggcagctgccagcatctcgtcca

SEQ ID NO: 13463 - DNA, 25 bp, synthetic construct
  source 1..25: mol_type = other DNA; mol_type = other DNA
gcggcgactgccagcatctcgtcca

SEQ ID NO: 13464 - DNA, 25 bp, synthetic construct
  source 1..25: mol_type = other DNA; mol_type = other DNA
gcggcggatgccagcatctcgtcca

SEQ ID NO: 13465 - DNA, 25 bp, synthetic construct
  source 1..25: mol_type = other DNA; mol_type = other DNA
gcggcggctaccagcatctcgtcca

SEQ ID NO: 13466 - DNA, 25 bp, synthetic construct
  source 1..25: mol_type = other DNA; mol_type = other DNA
gcggcggctgacagcatctcgtcca

SEQ ID NO: 13467 - DNA, 25 bp, synthetic construct
  source 1..25: mol_type = other DNA; mol_type = other DNA
gcggcggctgcaagcatctcgtcca

SEQ ID NO: 13468 - DNA, 25 bp, synthetic construct
  source 1..25: mol_type = other DNA; mol_type = other DNA
gcggcggctgccaacatctcgtcca

SEQ ID NO: 13469 - DNA, 25 bp, synthetic construct
  source 1..25: mol_type = other DNA; mol_type = other DNA
gcggcggctgccagaatctcgtcca

SEQ ID NO: 13470 - DNA, 25 bp, synthetic construct
  source 1..25: mol_type = other DNA; mol_type = other DNA
gcggcggctgccagcatatcgtcca

SEQ ID NO: 13471 - DNA, 25 bp, synthetic construct
  source 1..25: mol_type = other DNA; mol_type = other DNA
gcggcggctgccagcatctagtcca

SEQ ID NO: 13472 - DNA, 25 bp, synthetic construct
  source 1..25: mol_type = other DNA; mol_type = other DNA
gcggcggctgccagcatctcgtaca

SEQ ID NO: 13473 - DNA, 25 bp, synthetic construct
  source 1..25: mol_type = other DNA; mol_type = other DNA
gcggcggctgccagcatctcgtcaa

SEQ ID NO: 13474 - DNA, 25 bp, synthetic construct
  source 1..25: mol_type = other DNA; mol_type = other DNA
tacggcggctgccagcatctcgtcc

SEQ ID NO: 13475 - DNA, 25 bp, synthetic construct
  source 1..25: mol_type = other DNA; mol_type = other DNA
tgaggcggctgccagcatctcgtcc

SEQ ID NO: 13476 - DNA, 25 bp, synthetic construct
  source 1..25: mol_type = other DNA; mol_type = other DNA
tgcagcggctgccagcatctcgtcc

SEQ ID NO: 13477 - DNA, 25 bp, synthetic construct
  source 1..25: mol_type = other DNA; mol_type = other DNA
tgcgacggctgccagcatctcgtcc

SEQ ID NO: 13478 - DNA, 25 bp, synthetic construct
  source 1..25: mol_type = other DNA; mol_type = other DNA
tgcggaggctgccagcatctcgtcc

SEQ ID NO: 13479 - DNA, 25 bp, synthetic construct
  source 1..25: mol_type = other DNA; mol_type = other DNA
tgcggcagctgccagcatctcgtcc

SEQ ID NO: 13480 - DNA, 25 bp, synthetic construct
  source 1..25: mol_type = other DNA; mol_type = other DNA
tgcggcgactgccagcatctcgtcc

SEQ ID NO: 13481 - DNA, 25 bp, synthetic construct
  source 1..25: mol_type = other DNA; mol_type = other DNA
tgcggcggatgccagcatctcgtcc

SEQ ID NO: 13482 - DNA, 25 bp, synthetic construct
  source 1..25: mol_type = other DNA; mol_type = other DNA
tgcggcggctaccagcatctcgtcc

SEQ ID NO: 13483 - DNA, 25 bp, synthetic construct
  source 1..25: mol_type = other DNA; mol_type = other DNA
tgcggcggctgacagcatctcgtcc

SEQ ID NO: 13484 - DNA, 25 bp, synthetic construct
  source 1..25: mol_type = other DNA; mol_type = other DNA
tgcggcggctgcaagcatctcgtcc

SEQ ID NO: 13485 - DNA, 25 bp, synthetic construct
  source 1..25: mol_type = other DNA; mol_type = other DNA
tgcggcggctgccaacatctcgtcc

SEQ ID NO: 13486 - DNA, 25 bp, synthetic construct
  source 1..25: mol_type = other DNA; mol_type = other DNA
tgcggcggctgccagaatctcgtcc

SEQ ID NO: 13487 - DNA, 25 bp, synthetic construct
  source 1..25: mol_type = other DNA; mol_type = other DNA
tgcggcggctgccagcatatcgtcc

SEQ ID NO: 13488 - DNA, 25 bp, synthetic construct
  source 1..25: mol_type = other DNA; mol_type = other DNA
tgcggcggctgccagcatctagtcc

SEQ ID NO: 13489 - DNA, 25 bp, synthetic construct
  source 1..25: mol_type = other DNA; mol_type = other DNA
tgcggcggctgccagcatctcgtac

SEQ ID NO: 13490 - DNA, 25 bp, synthetic construct
  source 1..25: mol_type = other DNA; mol_type = other DNA
tgcggcggctgccagcatctcgtca

SEQ ID NO: 13491 - DNA, 25 bp, synthetic construct
  source 1..25: mol_type = other DNA; mol_type = other DNA
atgcggcggctgccagcatctcgtc

SEQ ID NO: 13492 - DNA, 25 bp, synthetic construct
  source 1..25: mol_type = other DNA; mol_type = other DNA
ctacggcggctgccagcatctcgtc

SEQ ID NO: 13493 - DNA, 25 bp, synthetic construct
  source 1..25: mol_type = other DNA; mol_type = other DNA
ctgaggcggctgccagcatctcgtc

SEQ ID NO: 13494 - DNA, 25 bp, synthetic construct
  source 1..25: mol_type = other DNA; mol_type = other DNA
ctgcagcggctgccagcatctcgtc

SEQ ID NO: 13495 - DNA, 25 bp, synthetic construct
  source 1..25: mol_type = other DNA; mol_type = other DNA
ctgcgacggctgccagcatctcgtc

SEQ ID NO: 13496 - DNA, 25 bp, synthetic construct
  source 1..25: mol_type = other DNA; mol_type = other DNA
ctgcggaggctgccagcatctcgtc

SEQ ID NO: 13497 - DNA, 25 bp, synthetic construct
  source 1..25: mol_type = other DNA; mol_type = other DNA
ctgcggcagctgccagcatctcgtc

SEQ ID NO: 13498 - DNA, 25 bp, synthetic construct
  source 1..25: mol_type = other DNA; mol_type = other DNA
ctgcggcgactgccagcatctcgtc

SEQ ID NO: 13499 - DNA, 25 bp, synthetic construct
  source 1..25: mol_type = other DNA; mol_type = other DNA
ctgcggcggatgccagcatctcgtc

SEQ ID NO: 13500 - DNA, 25 bp, synthetic construct
  source 1..25: mol_type = other DNA; mol_type = other DNA
ctgcggcggctaccagcatctcgtc

SEQ ID NO: 13501 - DNA, 25 bp, synthetic construct
  source 1..25: mol_type = other DNA; mol_type = other DNA
ctgcggcggctgacagcatctcgtc

SEQ ID NO: 13502 - DNA, 25 bp, synthetic construct
  source 1..25: mol_type = other DNA; mol_type = other DNA
ctgcggcggctgcaagcatctcgtc

SEQ ID NO: 13503 - DNA, 25 bp, synthetic construct
  source 1..25: mol_type = other DNA; mol_type = other DNA
ctgcggcggctgccaacatctcgtc

SEQ ID NO: 13504 - DNA, 25 bp, synthetic construct
  source 1..25: mol_type = other DNA; mol_type = other DNA
ctgcggcggctgccagaatctcgtc

SEQ ID NO: 13505 - DNA, 25 bp, synthetic construct
  source 1..25: mol_type = other DNA; mol_type = other DNA
ctgcggcggctgccagcatatcgtc

SEQ ID NO: 13506 - DNA, 25 bp, synthetic construct
  source 1..25: mol_type = other DNA; mol_type = other DNA
ctgcggcggctgccagcatctagtc

SEQ ID NO: 13507 - DNA, 25 bp, synthetic construct
  source 1..25: mol_type = other DNA; mol_type = other DNA
ctgcggcggctgccagcatctcgta

SEQ ID NO: 13508 - DNA, 25 bp, synthetic construct
  source 1..25: mol_type = other DNA; mol_type = other DNA
tatgcggcggctgccagcatctcgt

SEQ ID NO: 13509 - DNA, 25 bp, synthetic construct
  source 1..25: mol_type = other DNA; mol_type = other DNA
tctacggcggctgccagcatctcgt

SEQ ID NO: 13510 - DNA, 25 bp, synthetic construct
  source 1..25: mol_type = other DNA; mol_type = other DNA
tctgaggcggctgccagcatctcgt

SEQ ID NO: 13511 - DNA, 25 bp, synthetic construct
  source 1..25: mol_type = other DNA; mol_type = other DNA
tctgcagcggctgccagcatctcgt

SEQ ID NO: 13512 - DNA, 25 bp, synthetic construct
  source 1..25: mol_type = other DNA; mol_type = other DNA
tctgcgacggctgccagcatctcgt

SEQ ID NO: 13513 - DNA, 25 bp, synthetic construct
  source 1..25: mol_type = other DNA; mol_type = other DNA
tctgcggaggctgccagcatctcgt

SEQ ID NO: 13514 - DNA, 25 bp, synthetic construct
  source 1..25: mol_type = other DNA; mol_type = other DNA
tctgcggcagctgccagcatctcgt

SEQ ID NO: 13515 - DNA, 25 bp, synthetic construct
  source 1..25: mol_type = other DNA; mol_type = other DNA
tctgcggcgactgccagcatctcgt

SEQ ID NO: 13516 - DNA, 25 bp, synthetic construct
  source 1..25: mol_type = other DNA; mol_type = other DNA
tctgcggcggatgccagcatctcgt

SEQ ID NO: 13517 - DNA, 25 bp, synthetic construct
  source 1..25: mol_type = other DNA; mol_type = other DNA
tctgcggcggctaccagcatctcgt

SEQ ID NO: 13518 - DNA, 25 bp, synthetic construct
  source 1..25: mol_type = other DNA; mol_type = other DNA
tctgcggcggctgacagcatctcgt

SEQ ID NO: 13519 - DNA, 25 bp, synthetic construct
  source 1..25: mol_type = other DNA; mol_type = other DNA
tctgcggcggctgcaagcatctcgt

SEQ ID NO: 13520 - DNA, 25 bp, synthetic construct
  source 1..25: mol_type = other DNA; mol_type = other DNA
tctgcggcggctgccaacatctcgt

SEQ ID NO: 13521 - DNA, 25 bp, synthetic construct
  source 1..25: mol_type = other DNA; mol_type = other DNA
tctgcggcggctgccagaatctcgt

SEQ ID NO: 13522 - DNA, 25 bp, synthetic construct
  source 1..25: mol_type = other DNA; mol_type = other DNA
tctgcggcggctgccagcatatcgt

SEQ ID NO: 13523 - DNA, 25 bp, synthetic construct
  source 1..25: mol_type = other DNA; mol_type = other DNA
tctgcggcggctgccagcatctagt

SEQ ID NO: 13524 - DNA, 25 bp, synthetic construct
  source 1..25: mol_type = other DNA; mol_type = other DNA
atctgcggcggctgccagcatctcg

SEQ ID NO: 13525 - DNA, 25 bp, synthetic construct
  source 1..25: mol_type = other DNA; mol_type = other DNA
ctatgcggcggctgccagcatctcg

SEQ ID NO: 13526 - DNA, 25 bp, synthetic construct
  source 1..25: mol_type = other DNA; mol_type = other DNA
ctctacggcggctgccagcatctcg

SEQ ID NO: 13527 - DNA, 25 bp, synthetic construct
  source 1..25: mol_type = other DNA; mol_type = other DNA
ctctgaggcggctgccagcatctcg

SEQ ID NO: 13528 - DNA, 25 bp, synthetic construct
  source 1..25: mol_type = other DNA; mol_type = other DNA
ctctgcagcggctgccagcatctcg

SEQ ID NO: 13529 - DNA, 25 bp, synthetic construct
  source 1..25: mol_type = other DNA; mol_type = other DNA
ctctgcgacggctgccagcatctcg

SEQ ID NO: 13530 - DNA, 25 bp, synthetic construct
  source 1..25: mol_type = other DNA; mol_type = other DNA
ctctgcggaggctgccagcatctcg

SEQ ID NO: 13531 - DNA, 25 bp, synthetic construct
  source 1..25: mol_type = other DNA; mol_type = other DNA
ctctgcggcagctgccagcatctcg

SEQ ID NO: 13532 - DNA, 25 bp, synthetic construct
  source 1..25: mol_type = other DNA; mol_type = other DNA
ctctgcggcgactgccagcatctcg

SEQ ID NO: 13533 - DNA, 25 bp, synthetic construct
  source 1..25: mol_type = other DNA; mol_type = other DNA
ctctgcggcggatgccagcatctcg

SEQ ID NO: 13534 - DNA, 25 bp, synthetic construct
  source 1..25: mol_type = other DNA; mol_type = other DNA
ctctgcggcggctaccagcatctcg

SEQ ID NO: 13535 - DNA, 25 bp, synthetic construct
  source 1..25: mol_type = other DNA; mol_type = other DNA
ctctgcggcggctgacagcatctcg

SEQ ID NO: 13536 - DNA, 25 bp, synthetic construct
  source 1..25: mol_type = other DNA; mol_type = other DNA
ctctgcggcggctgcaagcatctcg

SEQ ID NO: 13537 - DNA, 25 bp, synthetic construct
  source 1..25: mol_type = other DNA; mol_type = other DNA
ctctgcggcggctgccaacatctcg

SEQ ID NO: 13538 - DNA, 25 bp, synthetic construct
  source 1..25: mol_type = other DNA; mol_type = other DNA
ctctgcggcggctgccagaatctcg

SEQ ID NO: 13539 - DNA, 25 bp, synthetic construct
  source 1..25: mol_type = other DNA; mol_type = other DNA
ctctgcggcggctgccagcatatcg

SEQ ID NO: 13540 - DNA, 25 bp, synthetic construct
  source 1..25: mol_type = other DNA; mol_type = other DNA
ctctgcggcggctgccagcatctag

SEQ ID NO: 13541 - DNA, 25 bp, synthetic construct
  source 1..25: mol_type = other DNA; mol_type = other DNA
actctgcggcggctgccagcatctc

SEQ ID NO: 13542 - DNA, 25 bp, synthetic construct
  source 1..25: mol_type = other DNA; mol_type = other DNA
gatctgcggcggctgccagcatctc

SEQ ID NO: 13543 - DNA, 25 bp, synthetic construct
  source 1..25: mol_type = other DNA; mol_type = other DNA
gctatgcggcggctgccagcatctc

SEQ ID NO: 13544 - DNA, 25 bp, synthetic construct
  source 1..25: mol_type = other DNA; mol_type = other DNA
gctctacggcggctgccagcatctc

SEQ ID NO: 13545 - DNA, 25 bp, synthetic construct
  source 1..25: mol_type = other DNA; mol_type = other DNA
gctctgaggcggctgccagcatctc

SEQ ID NO: 13546 - DNA, 25 bp, synthetic construct
  source 1..25: mol_type = other DNA; mol_type = other DNA
gctctgcagcggctgccagcatctc

SEQ ID NO: 13547 - DNA, 25 bp, synthetic construct
  source 1..25: mol_type = other DNA; mol_type = other DNA
gctctgcgacggctgccagcatctc

SEQ ID NO: 13548 - DNA, 25 bp, synthetic construct
  source 1..25: mol_type = other DNA; mol_type = other DNA
gctctgcggaggctgccagcatctc

SEQ ID NO: 13549 - DNA, 25 bp, synthetic construct
  source 1..25: mol_type = other DNA; mol_type = other DNA
gctctgcggcagctgccagcatctc

SEQ ID NO: 13550 - DNA, 25 bp, synthetic construct
  source 1..25: mol_type = other DNA; mol_type = other DNA
gctctgcggcgactgccagcatctc

SEQ ID NO: 13551 - DNA, 25 bp, synthetic construct
  source 1..25: mol_type = other DNA; mol_type = other DNA
gctctgcggcggatgccagcatctc

SEQ ID NO: 13552 - DNA, 25 bp, synthetic construct
  source 1..25: mol_type = other DNA; mol_type = other DNA
gctctgcggcggctaccagcatctc

SEQ ID NO: 13553 - DNA, 25 bp, synthetic construct
  source 1..25: mol_type = other DNA; mol_type = other DNA
gctctgcggcggctgacagcatctc

SEQ ID NO: 13554 - DNA, 25 bp, synthetic construct
  source 1..25: mol_type = other DNA; mol_type = other DNA
gctctgcggcggctgcaagcatctc

SEQ ID NO: 13555 - DNA, 25 bp, synthetic construct
  source 1..25: mol_type = other DNA; mol_type = other DNA
gctctgcggcggctgccagaatctc

SEQ ID NO: 13556 - DNA, 25 bp, synthetic construct
  source 1..25: mol_type = other DNA; mol_type = other DNA
gctctgcggcggctgccagcatatc

SEQ ID NO: 13557 - DNA, 25 bp, synthetic construct
  source 1..25: mol_type = other DNA; mol_type = other DNA
gctctgcggcggctgccagcatcta

SEQ ID NO: 13558 - DNA, 25 bp, synthetic construct
  source 1..25: mol_type = other DNA; mol_type = other DNA
agctctgcggcggctgccagcatct

SEQ ID NO: 13559 - DNA, 25 bp, synthetic construct
  source 1..25: mol_type = other DNA; mol_type = other DNA
gactctgcggcggctgccagcatct

SEQ ID NO: 13560 - DNA, 25 bp, synthetic construct
  source 1..25: mol_type = other DNA; mol_type = other DNA
ggatctgcggcggctgccagcatct

SEQ ID NO: 13561 - DNA, 25 bp, synthetic construct
  source 1..25: mol_type = other DNA; mol_type = other DNA
ggctatgcggcggctgccagcatct

SEQ ID NO: 13562 - DNA, 25 bp, synthetic construct
  source 1..25: mol_type = other DNA; mol_type = other DNA
ggctctacggcggctgccagcatct

SEQ ID NO: 13563 - DNA, 25 bp, synthetic construct
  source 1..25: mol_type = other DNA; mol_type = other DNA
ggctctgaggcggctgccagcatct

SEQ ID NO: 13564 - DNA, 25 bp, synthetic construct
  source 1..25: mol_type = other DNA; mol_type = other DNA
ggctctgcagcggctgccagcatct

SEQ ID NO: 13565 - DNA, 25 bp, synthetic construct
  source 1..25: mol_type = other DNA; mol_type = other DNA
ggctctgcgacggctgccagcatct

SEQ ID NO: 13566 - DNA, 25 bp, synthetic construct
  source 1..25: mol_type = other DNA; mol_type = other DNA
ggctctgcggaggctgccagcatct

SEQ ID NO: 13567 - DNA, 25 bp, synthetic construct
  source 1..25: mol_type = other DNA; mol_type = other DNA
ggctctgcggcagctgccagcatct

SEQ ID NO: 13568 - DNA, 25 bp, synthetic construct
  source 1..25: mol_type = other DNA; mol_type = other DNA
ggctctgcggcgactgccagcatct

SEQ ID NO: 13569 - DNA, 25 bp, synthetic construct
  source 1..25: mol_type = other DNA; mol_type = other DNA
ggctctgcggcggatgccagcatct

SEQ ID NO: 13570 - DNA, 25 bp, synthetic construct
  source 1..25: mol_type = other DNA; mol_type = other DNA
ggctctgcggcggctaccagcatct

SEQ ID NO: 13571 - DNA, 25 bp, synthetic construct
  source 1..25: mol_type = other DNA; mol_type = other DNA
ggctctgcggcggctgacagcatct

SEQ ID NO: 13572 - DNA, 25 bp, synthetic construct
  source 1..25: mol_type = other DNA; mol_type = other DNA
ggctctgcggcggctgcaagcatct

SEQ ID NO: 13573 - DNA, 25 bp, synthetic construct
  source 1..25: mol_type = other DNA; mol_type = other DNA
ggctctgcggcggctgccagaatct

SEQ ID NO: 13574 - DNA, 25 bp, synthetic construct
  source 1..25: mol_type = other DNA; mol_type = other DNA
ggctctgcggcggctgccagcatat

SEQ ID NO: 13575 - DNA, 25 bp, synthetic construct
  source 1..25: mol_type = other DNA; mol_type = other DNA
tagctctgcggcggctgccagcatc

SEQ ID NO: 13576 - DNA, 25 bp, synthetic construct
  source 1..25: mol_type = other DNA; mol_type = other DNA
tgactctgcggcggctgccagcatc

SEQ ID NO: 13577 - DNA, 25 bp, synthetic construct
  source 1..25: mol_type = other DNA; mol_type = other DNA
tggatctgcggcggctgccagcatc

SEQ ID NO: 13578 - DNA, 25 bp, synthetic construct
  source 1..25: mol_type = other DNA; mol_type = other DNA
tggctatgcggcggctgccagcatc

SEQ ID NO: 13579 - DNA, 25 bp, synthetic construct
  source 1..25: mol_type = other DNA; mol_type = other DNA
tggctctacggcggctgccagcatc

SEQ ID NO: 13580 - DNA, 25 bp, synthetic construct
  source 1..25: mol_type = other DNA; mol_type = other DNA
tggctctgaggcggctgccagcatc

SEQ ID NO: 13581 - DNA, 25 bp, synthetic construct
  source 1..25: mol_type = other DNA; mol_type = other DNA
tggctctgcagcggctgccagcatc

SEQ ID NO: 13582 - DNA, 25 bp, synthetic construct
  source 1..25: mol_type = other DNA; mol_type = other DNA
tggctctgcgacggctgccagcatc

SEQ ID NO: 13583 - DNA, 25 bp, synthetic construct
  source 1..25: mol_type = other DNA; mol_type = other DNA
tggctctgcggaggctgccagcatc

SEQ ID NO: 13584 - DNA, 25 bp, synthetic construct
  source 1..25: mol_type = other DNA; mol_type = other DNA
tggctctgcggcagctgccagcatc

SEQ ID NO: 13585 - DNA, 25 bp, synthetic construct
  source 1..25: mol_type = other DNA; mol_type = other DNA
tggctctgcggcgactgccagcatc

SEQ ID NO: 13586 - DNA, 25 bp, synthetic construct
  source 1..25: mol_type = other DNA; mol_type = other DNA
tggctctgcggcggatgccagcatc

SEQ ID NO: 13587 - DNA, 25 bp, synthetic construct
  source 1..25: mol_type = other DNA; mol_type = other DNA
tggctctgcggcggctaccagcatc

SEQ ID NO: 13588 - DNA, 25 bp, synthetic construct
  source 1..25: mol_type = other DNA; mol_type = other DNA
tggctctgcggcggctgacagcatc

SEQ ID NO: 13589 - DNA, 25 bp, synthetic construct
  source 1..25: mol_type = other DNA; mol_type = other DNA
tggctctgcggcggctgcaagcatc

SEQ ID NO: 13590 - DNA, 25 bp, synthetic construct
  source 1..25: mol_type = other DNA; mol_type = other DNA
tggctctgcggcggctgccagaatc

SEQ ID NO: 13591 - DNA, 25 bp, synthetic construct
  source 1..25: mol_type = other DNA; mol_type = other DNA
tggctctgcggcggctgccagcata

SEQ ID NO: 13592 - DNA, 25 bp, synthetic construct
  source 1..25: mol_type = other DNA; mol_type = other DNA
ttagctctgcggcggctgccagcat

SEQ ID NO: 13593 - DNA, 25 bp, synthetic construct
  source 1..25: mol_type = other DNA; mol_type = other DNA
ttgactctgcggcggctgccagcat

SEQ ID NO: 13594 - DNA, 25 bp, synthetic construct
  source 1..25: mol_type = other DNA; mol_type = other DNA
ttggatctgcggcggctgccagcat

SEQ ID NO: 13595 - DNA, 25 bp, synthetic construct
  source 1..25: mol_type = other DNA; mol_type = other DNA
ttggctatgcggcggctgccagcat

SEQ ID NO: 13596 - DNA, 25 bp, synthetic construct
  source 1..25: mol_type = other DNA; mol_type = other DNA
ttggctctacggcggctgccagcat

SEQ ID NO: 13597 - DNA, 25 bp, synthetic construct
  source 1..25: mol_type = other DNA; mol_type = other DNA
ttggctctgaggcggctgccagcat

SEQ ID NO: 13598 - DNA, 25 bp, synthetic construct
  source 1..25: mol_type = other DNA; mol_type = other DNA
ttggctctgcagcggctgccagcat

SEQ ID NO: 13599 - DNA, 25 bp, synthetic construct
  source 1..25: mol_type = other DNA; mol_type = other DNA
ttggctctgcgacggctgccagcat

SEQ ID NO: 13600 - DNA, 25 bp, synthetic construct
  source 1..25: mol_type = other DNA; mol_type = other DNA
ttggctctgcggaggctgccagcat

SEQ ID NO: 13601 - DNA, 25 bp, synthetic construct
  source 1..25: mol_type = other DNA; mol_type = other DNA
ttggctctgcggcagctgccagcat

SEQ ID NO: 13602 - DNA, 25 bp, synthetic construct
  source 1..25: mol_type = other DNA; mol_type = other DNA
ttggctctgcggcgactgccagcat

SEQ ID NO: 13603 - DNA, 25 bp, synthetic construct
  source 1..25: mol_type = other DNA; mol_type = other DNA
ttggctctgcggcggatgccagcat

SEQ ID NO: 13604 - DNA, 25 bp, synthetic construct
  source 1..25: mol_type = other DNA; mol_type = other DNA
ttggctctgcggcggctaccagcat

SEQ ID NO: 13605 - DNA, 25 bp, synthetic construct
  source 1..25: mol_type = other DNA; mol_type = other DNA
ttggctctgcggcggctgacagcat

SEQ ID NO: 13606 - DNA, 25 bp, synthetic construct
  source 1..25: mol_type = other DNA; mol_type = other DNA
ttggctctgcggcggctgcaagcat

SEQ ID NO: 13607 - DNA, 25 bp, synthetic construct
  source 1..25: mol_type = other DNA; mol_type = other DNA
ttggctctgcggcggctgccagaat

SEQ ID NO: 13608 - DNA, 25 bp, synthetic construct
  source 1..25: mol_type = other DNA; mol_type = other DNA
attggctctgcggcggctgccagca

SEQ ID NO: 13609 - DNA, 25 bp, synthetic construct
  source 1..25: mol_type = other DNA; mol_type = other DNA
gttagctctgcggcggctgccagca

SEQ ID NO: 13610 - DNA, 25 bp, synthetic construct
  source 1..25: mol_type = other DNA; mol_type = other DNA
gttgactctgcggcggctgccagca

SEQ ID NO: 13611 - DNA, 25 bp, synthetic construct
  source 1..25: mol_type = other DNA; mol_type = other DNA
gttggatctgcggcggctgccagca

SEQ ID NO: 13612 - DNA, 25 bp, synthetic construct
  source 1..25: mol_type = other DNA; mol_type = other DNA
gttggctatgcggcggctgccagca

SEQ ID NO: 13613 - DNA, 25 bp, synthetic construct
  source 1..25: mol_type = other DNA; mol_type = other DNA
gttggctctacggcggctgccagca

SEQ ID NO: 13614 - DNA, 25 bp, synthetic construct
  source 1..25: mol_type = other DNA; mol_type = other DNA
gttggctctgaggcggctgccagca

SEQ ID NO: 13615 - DNA, 25 bp, synthetic construct
  source 1..25: mol_type = other DNA; mol_type = other DNA
gttggctctgcagcggctgccagca

SEQ ID NO: 13616 - DNA, 25 bp, synthetic construct
  source 1..25: mol_type = other DNA; mol_type = other DNA
gttggctctgcgacggctgccagca

SEQ ID NO: 13617 - DNA, 25 bp, synthetic construct
  source 1..25: mol_type = other DNA; mol_type = other DNA
gttggctctgcggaggctgccagca

SEQ ID NO: 13618 - DNA, 25 bp, synthetic construct
  source 1..25: mol_type = other DNA; mol_type = other DNA
gttggctctgcggcagctgccagca

SEQ ID NO: 13619 - DNA, 25 bp, synthetic construct
  source 1..25: mol_type = other DNA; mol_type = other DNA
gttggctctgcggcgactgccagca

SEQ ID NO: 13620 - DNA, 25 bp, synthetic construct
  source 1..25: mol_type = other DNA; mol_type = other DNA
gttggctctgcggcggatgccagca

SEQ ID NO: 13621 - DNA, 25 bp, synthetic construct
  source 1..25: mol_type = other DNA; mol_type = other DNA
gttggctctgcggcggctaccagca

SEQ ID NO: 13622 - DNA, 25 bp, synthetic construct
  source 1..25: mol_type = other DNA; mol_type = other DNA
gttggctctgcggcggctgacagca

SEQ ID NO: 13623 - DNA, 25 bp, synthetic construct
  source 1..25: mol_type = other DNA; mol_type = other DNA
gttggctctgcggcggctgcaagca

SEQ ID NO: 13624 - DNA, 25 bp, synthetic construct
  source 1..25: mol_type = other DNA; mol_type = other DNA
gttggctctgcggcggctgccagaa

SEQ ID NO: 13625 - DNA, 25 bp, synthetic construct
  source 1..25: mol_type = other DNA; mol_type = other DNA
agttggctctgcggcggctgccagc

SEQ ID NO: 13626 - DNA, 25 bp, synthetic construct
  source 1..25: mol_type = other DNA; mol_type = other DNA
cattggctctgcggcggctgccagc

SEQ ID NO: 13627 - DNA, 25 bp, synthetic construct
  source 1..25: mol_type = other DNA; mol_type = other DNA
cgttagctctgcggcggctgccagc

SEQ ID NO: 13628 - DNA, 25 bp, synthetic construct
  source 1..25: mol_type = other DNA; mol_type = other DNA
cgttgactctgcggcggctgccagc

SEQ ID NO: 13629 - DNA, 25 bp, synthetic construct
  source 1..25: mol_type = other DNA; mol_type = other DNA
cgttggatctgcggcggctgccagc

SEQ ID NO: 13630 - DNA, 25 bp, synthetic construct
  source 1..25: mol_type = other DNA; mol_type = other DNA
cgttggctatgcggcggctgccagc

SEQ ID NO: 13631 - DNA, 25 bp, synthetic construct
  source 1..25: mol_type = other DNA; mol_type = other DNA
cgttggctctacggcggctgccagc

SEQ ID NO: 13632 - DNA, 25 bp, synthetic construct
  source 1..25: mol_type = other DNA; mol_type = other DNA
cgttggctctgaggcggctgccagc

SEQ ID NO: 13633 - DNA, 25 bp, synthetic construct
  source 1..25: mol_type = other DNA; mol_type = other DNA
cgttggctctgcagcggctgccagc

SEQ ID NO: 13634 - DNA, 25 bp, synthetic construct
  source 1..25: mol_type = other DNA; mol_type = other DNA
cgttggctctgcgacggctgccagc

SEQ ID NO: 13635 - DNA, 25 bp, synthetic construct
  source 1..25: mol_type = other DNA; mol_type = other DNA
cgttggctctgcggaggctgccagc

SEQ ID NO: 13636 - DNA, 25 bp, synthetic construct
  source 1..25: mol_type = other DNA; mol_type = other DNA
cgttggctctgcggcagctgccagc

SEQ ID NO: 13637 - DNA, 25 bp, synthetic construct
  source 1..25: mol_type = other DNA; mol_type = other DNA
cgttggctctgcggcgactgccagc

SEQ ID NO: 13638 - DNA, 25 bp, synthetic construct
  source 1..25: mol_type = other DNA; mol_type = other DNA
cgttggctctgcggcggatgccagc

SEQ ID NO: 13639 - DNA, 25 bp, synthetic construct
  source 1..25: mol_type = other DNA; mol_type = other DNA
cgttggctctgcggcggctaccagc

SEQ ID NO: 13640 - DNA, 25 bp, synthetic construct
  source 1..25: mol_type = other DNA; mol_type = other DNA
cgttggctctgcggcggctgacagc

SEQ ID NO: 13641 - DNA, 25 bp, synthetic construct
  source 1..25: mol_type = other DNA; mol_type = other DNA
cgttggctctgcggcggctgcaagc

SEQ ID NO: 13642 - DNA, 25 bp, synthetic construct
  source 1..25: mol_type = other DNA; mol_type = other DNA
cgttggctctgcggcggctgccaga

SEQ ID NO: 13643 - DNA, 25 bp, synthetic construct
  source 1..25: mol_type = other DNA; mol_type = other DNA
acgttggctctgcggcggctgccag

SEQ ID NO: 13644 - DNA, 25 bp, synthetic construct
  source 1..25: mol_type = other DNA; mol_type = other DNA
gagttggctctgcggcggctgccag

SEQ ID NO: 13645 - DNA, 25 bp, synthetic construct
  source 1..25: mol_type = other DNA; mol_type = other DNA
gcattggctctgcggcggctgccag

SEQ ID NO: 13646 - DNA, 25 bp, synthetic construct
  source 1..25: mol_type = other DNA; mol_type = other DNA
gcgttagctctgcggcggctgccag

SEQ ID NO: 13647 - DNA, 25 bp, synthetic construct
  source 1..25: mol_type = other DNA; mol_type = other DNA
gcgttgactctgcggcggctgccag

SEQ ID NO: 13648 - DNA, 25 bp, synthetic construct
  source 1..25: mol_type = other DNA; mol_type = other DNA
gcgttggatctgcggcggctgccag

SEQ ID NO: 13649 - DNA, 25 bp, synthetic construct
  source 1..25: mol_type = other DNA; mol_type = other DNA
gcgttggctatgcggcggctgccag

SEQ ID NO: 13650 - DNA, 25 bp, synthetic construct
  source 1..25: mol_type = other DNA; mol_type = other DNA
gcgttggctctacggcggctgccag

SEQ ID NO: 13651 - DNA, 25 bp, synthetic construct
  source 1..25: mol_type = other DNA; mol_type = other DNA
gcgttggctctgaggcggctgccag

SEQ ID NO: 13652 - DNA, 25 bp, synthetic construct
  source 1..25: mol_type = other DNA; mol_type = other DNA
gcgttggctctgcagcggctgccag

SEQ ID NO: 13653 - DNA, 25 bp, synthetic construct
  source 1..25: mol_type = other DNA; mol_type = other DNA
gcgttggctctgcgacggctgccag

SEQ ID NO: 13654 - DNA, 25 bp, synthetic construct
  source 1..25: mol_type = other DNA; mol_type = other DNA
gcgttggctctgcggaggctgccag

SEQ ID NO: 13655 - DNA, 25 bp, synthetic construct
  source 1..25: mol_type = other DNA; mol_type = other DNA
gcgttggctctgcggcagctgccag

SEQ ID NO: 13656 - DNA, 25 bp, synthetic construct
  source 1..25: mol_type = other DNA; mol_type = other DNA
gcgttggctctgcggcgactgccag

SEQ ID NO: 13657 - DNA, 25 bp, synthetic construct
  source 1..25: mol_type = other DNA; mol_type = other DNA
gcgttggctctgcggcggatgccag

SEQ ID NO: 13658 - DNA, 25 bp, synthetic construct
  source 1..25: mol_type = other DNA; mol_type = other DNA
gcgttggctctgcggcggctaccag

SEQ ID NO: 13659 - DNA, 25 bp, synthetic construct
  source 1..25: mol_type = other DNA; mol_type = other DNA
gcgttggctctgcggcggctgacag

SEQ ID NO: 13660 - DNA, 25 bp, synthetic construct
  source 1..25: mol_type = other DNA; mol_type = other DNA
gcgttggctctgcggcggctgcaag

SEQ ID NO: 13661 - DNA, 25 bp, synthetic construct
  source 1..25: mol_type = other DNA; mol_type = other DNA
aacgttggctctgcggcggctgcca

SEQ ID NO: 13662 - DNA, 25 bp, synthetic construct
  source 1..25: mol_type = other DNA; mol_type = other DNA
agagttggctctgcggcggctgcca

SEQ ID NO: 13663 - DNA, 25 bp, synthetic construct
  source 1..25: mol_type = other DNA; mol_type = other DNA
agcattggctctgcggcggctgcca

SEQ ID NO: 13664 - DNA, 25 bp, synthetic construct
  source 1..25: mol_type = other DNA; mol_type = other DNA
agcgttagctctgcggcggctgcca

SEQ ID NO: 13665 - DNA, 25 bp, synthetic construct
  source 1..25: mol_type = other DNA; mol_type = other DNA
agcgttgactctgcggcggctgcca

SEQ ID NO: 13666 - DNA, 25 bp, synthetic construct
  source 1..25: mol_type = other DNA; mol_type = other DNA
agcgttggatctgcggcggctgcca

SEQ ID NO: 13667 - DNA, 25 bp, synthetic construct
  source 1..25: mol_type = other DNA; mol_type = other DNA
agcgttggctatgcggcggctgcca

SEQ ID NO: 13668 - DNA, 25 bp, synthetic construct
  source 1..25: mol_type = other DNA; mol_type = other DNA
agcgttggctctacggcggctgcca

SEQ ID NO: 13669 - DNA, 25 bp, synthetic construct
  source 1..25: mol_type = other DNA; mol_type = other DNA
agcgttggctctgaggcggctgcca

SEQ ID NO: 13670 - DNA, 25 bp, synthetic construct
  source 1..25: mol_type = other DNA; mol_type = other DNA
agcgttggctctgcagcggctgcca

SEQ ID NO: 13671 - DNA, 25 bp, synthetic construct
  source 1..25: mol_type = other DNA; mol_type = other DNA
agcgttggctctgcgacggctgcca

SEQ ID NO: 13672 - DNA, 25 bp, synthetic construct
  source 1..25: mol_type = other DNA; mol_type = other DNA
agcgttggctctgcggaggctgcca

SEQ ID NO: 13673 - DNA, 25 bp, synthetic construct
  source 1..25: mol_type = other DNA; mol_type = other DNA
agcgttggctctgcggcagctgcca

SEQ ID NO: 13674 - DNA, 25 bp, synthetic construct
  source 1..25: mol_type = other DNA; mol_type = other DNA
agcgttggctctgcggcgactgcca

SEQ ID NO: 13675 - DNA, 25 bp, synthetic construct
  source 1..25: mol_type = other DNA; mol_type = other DNA
agcgttggctctgcggcggatgcca

SEQ ID NO: 13676 - DNA, 25 bp, synthetic construct
  source 1..25: mol_type = other DNA; mol_type = other DNA
agcgttggctctgcggcggctgaca

SEQ ID NO: 13677 - DNA, 25 bp, synthetic construct
  source 1..25: mol_type = other DNA; mol_type = other DNA
agcgttggctctgcggcggctgcaa

SEQ ID NO: 13678 - DNA, 25 bp, synthetic construct
  source 1..25: mol_type = other DNA; mol_type = other DNA
aagcgttggctctgcggcggctgcc

SEQ ID NO: 13679 - DNA, 25 bp, synthetic construct
  source 1..25: mol_type = other DNA; mol_type = other DNA
caacgttggctctgcggcggctgcc

SEQ ID NO: 13680 - DNA, 25 bp, synthetic construct
  source 1..25: mol_type = other DNA; mol_type = other DNA
cagagttggctctgcggcggctgcc

SEQ ID NO: 13681 - DNA, 25 bp, synthetic construct
  source 1..25: mol_type = other DNA; mol_type = other DNA
cagcattggctctgcggcggctgcc

SEQ ID NO: 13682 - DNA, 25 bp, synthetic construct
  source 1..25: mol_type = other DNA; mol_type = other DNA
cagcgttagctctgcggcggctgcc

SEQ ID NO: 13683 - DNA, 25 bp, synthetic construct
  source 1..25: mol_type = other DNA; mol_type = other DNA
cagcgttgactctgcggcggctgcc

SEQ ID NO: 13684 - DNA, 25 bp, synthetic construct
  source 1..25: mol_type = other DNA; mol_type = other DNA
cagcgttggatctgcggcggctgcc

SEQ ID NO: 13685 - DNA, 25 bp, synthetic construct
  source 1..25: mol_type = other DNA; mol_type = other DNA
cagcgttggctatgcggcggctgcc

SEQ ID NO: 13686 - DNA, 25 bp, synthetic construct
  source 1..25: mol_type = other DNA; mol_type = other DNA
cagcgttggctctacggcggctgcc

SEQ ID NO: 13687 - DNA, 25 bp, synthetic construct
  source 1..25: mol_type = other DNA; mol_type = other DNA
cagcgttggctctgaggcggctgcc

SEQ ID NO: 13688 - DNA, 25 bp, synthetic construct
  source 1..25: mol_type = other DNA; mol_type = other DNA
cagcgttggctctgcagcggctgcc

SEQ ID NO: 13689 - DNA, 25 bp, synthetic construct
  source 1..25: mol_type = other DNA; mol_type = other DNA
cagcgttggctctgcgacggctgcc

SEQ ID NO: 13690 - DNA, 25 bp, synthetic construct
  source 1..25: mol_type = other DNA; mol_type = other DNA
cagcgttggctctgcggaggctgcc

SEQ ID NO: 13691 - DNA, 25 bp, synthetic construct
  source 1..25: mol_type = other DNA; mol_type = other DNA
cagcgttggctctgcggcagctgcc

SEQ ID NO: 13692 - DNA, 25 bp, synthetic construct
  source 1..25: mol_type = other DNA; mol_type = other DNA
cagcgttggctctgcggcgactgcc

SEQ ID NO: 13693 - DNA, 25 bp, synthetic construct
  source 1..25: mol_type = other DNA; mol_type = other DNA
cagcgttggctctgcggcggatgcc

SEQ ID NO: 13694 - DNA, 25 bp, synthetic construct
  source 1..25: mol_type = other DNA; mol_type = other DNA
cagcgttggctctgcggcggctgac

SEQ ID NO: 13695 - DNA, 25 bp, synthetic construct
  source 1..25: mol_type = other DNA; mol_type = other DNA
cagcgttggctctgcggcggctgca

SEQ ID NO: 13696 - DNA, 25 bp, synthetic construct
  source 1..25: mol_type = other DNA; mol_type = other DNA
acagcgttggctctgcggcggctgc

SEQ ID NO: 13697 - DNA, 25 bp, synthetic construct
  source 1..25: mol_type = other DNA; mol_type = other DNA
gaagcgttggctctgcggcggctgc

SEQ ID NO: 13698 - DNA, 25 bp, synthetic construct
  source 1..25: mol_type = other DNA; mol_type = other DNA
gcaacgttggctctgcggcggctgc

SEQ ID NO: 13699 - DNA, 25 bp, synthetic construct
  source 1..25: mol_type = other DNA; mol_type = other DNA
gcagagttggctctgcggcggctgc

SEQ ID NO: 13700 - DNA, 25 bp, synthetic construct
  source 1..25: mol_type = other DNA; mol_type = other DNA
gcagcattggctctgcggcggctgc

SEQ ID NO: 13701 - DNA, 25 bp, synthetic construct
  source 1..25: mol_type = other DNA; mol_type = other DNA
gcagcgttagctctgcggcggctgc

SEQ ID NO: 13702 - DNA, 25 bp, synthetic construct
  source 1..25: mol_type = other DNA; mol_type = other DNA
gcagcgttgactctgcggcggctgc

SEQ ID NO: 13703 - DNA, 25 bp, synthetic construct
  source 1..25: mol_type = other DNA; mol_type = other DNA
gcagcgttggatctgcggcggctgc

SEQ ID NO: 13704 - DNA, 25 bp, synthetic construct
  source 1..25: mol_type = other DNA; mol_type = other DNA
gcagcgttggctatgcggcggctgc

SEQ ID NO: 13705 - DNA, 25 bp, synthetic construct
  source 1..25: mol_type = other DNA; mol_type = other DNA
gcagcgttggctctacggcggctgc

SEQ ID NO: 13706 - DNA, 25 bp, synthetic construct
  source 1..25: mol_type = other DNA; mol_type = other DNA
gcagcgttggctctgaggcggctgc

SEQ ID NO: 13707 - DNA, 25 bp, synthetic construct
  source 1..25: mol_type = other DNA; mol_type = other DNA
gcagcgttggctctgcagcggctgc

SEQ ID NO: 13708 - DNA, 25 bp, synthetic construct
  source 1..25: mol_type = other DNA; mol_type = other DNA
gcagcgttggctctgcgacggctgc

SEQ ID NO: 13709 - DNA, 25 bp, synthetic construct
  source 1..25: mol_type = other DNA; mol_type = other DNA
gcagcgttggctctgcggaggctgc

SEQ ID NO: 13710 - DNA, 25 bp, synthetic construct
  source 1..25: mol_type = other DNA; mol_type = other DNA
gcagcgttggctctgcggcagctgc

SEQ ID NO: 13711 - DNA, 25 bp, synthetic construct
  source 1..25: mol_type = other DNA; mol_type = other DNA
gcagcgttggctctgcggcgactgc

SEQ ID NO: 13712 - DNA, 25 bp, synthetic construct
  source 1..25: mol_type = other DNA; mol_type = other DNA
gcagcgttggctctgcggcggatgc

SEQ ID NO: 13713 - DNA, 25 bp, synthetic construct
  source 1..25: mol_type = other DNA; mol_type = other DNA
gcagcgttggctctgcggcggctga

SEQ ID NO: 13714 - DNA, 25 bp, synthetic construct
  source 1..25: mol_type = other DNA; mol_type = other DNA
agcagcgttggctctgcggcggctg

SEQ ID NO: 13715 - DNA, 25 bp, synthetic construct
  source 1..25: mol_type = other DNA; mol_type = other DNA
cacagcgttggctctgcggcggctg

SEQ ID NO: 13716 - DNA, 25 bp, synthetic construct
  source 1..25: mol_type = other DNA; mol_type = other DNA
cgaagcgttggctctgcggcggctg

SEQ ID NO: 13717 - DNA, 25 bp, synthetic construct
  source 1..25: mol_type = other DNA; mol_type = other DNA
cgcaacgttggctctgcggcggctg

SEQ ID NO: 13718 - DNA, 25 bp, synthetic construct
  source 1..25: mol_type = other DNA; mol_type = other DNA
cgcagagttggctctgcggcggctg

SEQ ID NO: 13719 - DNA, 25 bp, synthetic construct
  source 1..25: mol_type = other DNA; mol_type = other DNA
cgcagcattggctctgcggcggctg

SEQ ID NO: 13720 - DNA, 25 bp, synthetic construct
  source 1..25: mol_type = other DNA; mol_type = other DNA
cgcagcgttagctctgcggcggctg

SEQ ID NO: 13721 - DNA, 25 bp, synthetic construct
  source 1..25: mol_type = other DNA; mol_type = other DNA
cgcagcgttgactctgcggcggctg

SEQ ID NO: 13722 - DNA, 25 bp, synthetic construct
  source 1..25: mol_type = other DNA; mol_type = other DNA
cgcagcgttggatctgcggcggctg

SEQ ID NO: 13723 - DNA, 25 bp, synthetic construct
  source 1..25: mol_type = other DNA; mol_type = other DNA
cgcagcgttggctatgcggcggctg

SEQ ID NO: 13724 - DNA, 25 bp, synthetic construct
  source 1..25: mol_type = other DNA; mol_type = other DNA
cgcagcgttggctctacggcggctg

SEQ ID NO: 13725 - DNA, 25 bp, synthetic construct
  source 1..25: mol_type = other DNA; mol_type = other DNA
cgcagcgttggctctgaggcggctg

SEQ ID NO: 13726 - DNA, 25 bp, synthetic construct
  source 1..25: mol_type = other DNA; mol_type = other DNA
cgcagcgttggctctgcagcggctg

SEQ ID NO: 13727 - DNA, 25 bp, synthetic construct
  source 1..25: mol_type = other DNA; mol_type = other DNA
cgcagcgttggctctgcgacggctg

SEQ ID NO: 13728 - DNA, 25 bp, synthetic construct
  source 1..25: mol_type = other DNA; mol_type = other DNA
cgcagcgttggctctgcggaggctg

SEQ ID NO: 13729 - DNA, 25 bp, synthetic construct
  source 1..25: mol_type = other DNA; mol_type = other DNA
cgcagcgttggctctgcggcagctg

SEQ ID NO: 13730 - DNA, 25 bp, synthetic construct
  source 1..25: mol_type = other DNA; mol_type = other DNA
cgcagcgttggctctgcggcgactg

SEQ ID NO: 13731 - DNA, 25 bp, synthetic construct
  source 1..25: mol_type = other DNA; mol_type = other DNA
cgcagcgttggctctgcggcggatg

SEQ ID NO: 13732 - DNA, 25 bp, synthetic construct
  source 1..25: mol_type = other DNA; mol_type = other DNA
acgcagcgttggctctgcggcggct

SEQ ID NO: 13733 - DNA, 25 bp, synthetic construct
  source 1..25: mol_type = other DNA; mol_type = other DNA
cagcagcgttggctctgcggcggct

SEQ ID NO: 13734 - DNA, 25 bp, synthetic construct
  source 1..25: mol_type = other DNA; mol_type = other DNA
ccacagcgttggctctgcggcggct

SEQ ID NO: 13735 - DNA, 25 bp, synthetic construct
  source 1..25: mol_type = other DNA; mol_type = other DNA
ccgaagcgttggctctgcggcggct

SEQ ID NO: 13736 - DNA, 25 bp, synthetic construct
  source 1..25: mol_type = other DNA; mol_type = other DNA
ccgcaacgttggctctgcggcggct

SEQ ID NO: 13737 - DNA, 25 bp, synthetic construct
  source 1..25: mol_type = other DNA; mol_type = other DNA
ccgcagagttggctctgcggcggct

SEQ ID NO: 13738 - DNA, 25 bp, synthetic construct
  source 1..25: mol_type = other DNA; mol_type = other DNA
ccgcagcattggctctgcggcggct

SEQ ID NO: 13739 - DNA, 25 bp, synthetic construct
  source 1..25: mol_type = other DNA; mol_type = other DNA
ccgcagcgttagctctgcggcggct

SEQ ID NO: 13740 - DNA, 25 bp, synthetic construct
  source 1..25: mol_type = other DNA; mol_type = other DNA
ccgcagcgttgactctgcggcggct

SEQ ID NO: 13741 - DNA, 25 bp, synthetic construct
  source 1..25: mol_type = other DNA; mol_type = other DNA
ccgcagcgttggatctgcggcggct

SEQ ID NO: 13742 - DNA, 25 bp, synthetic construct
  source 1..25: mol_type = other DNA; mol_type = other DNA
ccgcagcgttggctatgcggcggct

SEQ ID NO: 13743 - DNA, 25 bp, synthetic construct
  source 1..25: mol_type = other DNA; mol_type = other DNA
ccgcagcgttggctctacggcggct

SEQ ID NO: 13744 - DNA, 25 bp, synthetic construct
  source 1..25: mol_type = other DNA; mol_type = other DNA
ccgcagcgttggctctgaggcggct

SEQ ID NO: 13745 - DNA, 25 bp, synthetic construct
  source 1..25: mol_type = other DNA; mol_type = other DNA
ccgcagcgttggctctgcagcggct

SEQ ID NO: 13746 - DNA, 25 bp, synthetic construct
  source 1..25: mol_type = other DNA; mol_type = other DNA
ccgcagcgttggctctgcgacggct

SEQ ID NO: 13747 - DNA, 25 bp, synthetic construct
  source 1..25: mol_type = other DNA; mol_type = other DNA
ccgcagcgttggctctgcggaggct

SEQ ID NO: 13748 - DNA, 25 bp, synthetic construct
  source 1..25: mol_type = other DNA; mol_type = other DNA
ccgcagcgttggctctgcggcagct

SEQ ID NO: 13749 - DNA, 25 bp, synthetic construct
  source 1..25: mol_type = other DNA; mol_type = other DNA
ccgcagcgttggctctgcggcggat

SEQ ID NO: 13750 - DNA, 25 bp, synthetic construct
  source 1..25: mol_type = other DNA; mol_type = other DNA
accgcagcgttggctctgcggcggc

SEQ ID NO: 13751 - DNA, 25 bp, synthetic construct
  source 1..25: mol_type = other DNA; mol_type = other DNA
gacgcagcgttggctctgcggcggc

SEQ ID NO: 13752 - DNA, 25 bp, synthetic construct
  source 1..25: mol_type = other DNA; mol_type = other DNA
gcagcagcgttggctctgcggcggc

SEQ ID NO: 13753 - DNA, 25 bp, synthetic construct
  source 1..25: mol_type = other DNA; mol_type = other DNA
gccacagcgttggctctgcggcggc

SEQ ID NO: 13754 - DNA, 25 bp, synthetic construct
  source 1..25: mol_type = other DNA; mol_type = other DNA
gccgaagcgttggctctgcggcggc

SEQ ID NO: 13755 - DNA, 25 bp, synthetic construct
  source 1..25: mol_type = other DNA; mol_type = other DNA
gccgcaacgttggctctgcggcggc

SEQ ID NO: 13756 - DNA, 25 bp, synthetic construct
  source 1..25: mol_type = other DNA; mol_type = other DNA
gccgcagagttggctctgcggcggc

SEQ ID NO: 13757 - DNA, 25 bp, synthetic construct
  source 1..25: mol_type = other DNA; mol_type = other DNA
gccgcagcattggctctgcggcggc

SEQ ID NO: 13758 - DNA, 25 bp, synthetic construct
  source 1..25: mol_type = other DNA; mol_type = other DNA
gccgcagcgttagctctgcggcggc

SEQ ID NO: 13759 - DNA, 25 bp, synthetic construct
  source 1..25: mol_type = other DNA; mol_type = other DNA
gccgcagcgttgactctgcggcggc

SEQ ID NO: 13760 - DNA, 25 bp, synthetic construct
  source 1..25: mol_type = other DNA; mol_type = other DNA
gccgcagcgttggatctgcggcggc

SEQ ID NO: 13761 - DNA, 25 bp, synthetic construct
  source 1..25: mol_type = other DNA; mol_type = other DNA
gccgcagcgttggctatgcggcggc

SEQ ID NO: 13762 - DNA, 25 bp, synthetic construct
  source 1..25: mol_type = other DNA; mol_type = other DNA
gccgcagcgttggctctacggcggc

SEQ ID NO: 13763 - DNA, 25 bp, synthetic construct
  source 1..25: mol_type = other DNA; mol_type = other DNA
gccgcagcgttggctctgaggcggc

SEQ ID NO: 13764 - DNA, 25 bp, synthetic construct
  source 1..25: mol_type = other DNA; mol_type = other DNA
gccgcagcgttggctctgcagcggc

SEQ ID NO: 13765 - DNA, 25 bp, synthetic construct
  source 1..25: mol_type = other DNA; mol_type = other DNA
gccgcagcgttggctctgcgacggc

SEQ ID NO: 13766 - DNA, 25 bp, synthetic construct
  source 1..25: mol_type = other DNA; mol_type = other DNA
gccgcagcgttggctctgcggaggc

SEQ ID NO: 13767 - DNA, 25 bp, synthetic construct
  source 1..25: mol_type = other DNA; mol_type = other DNA
gccgcagcgttggctctgcggcagc

SEQ ID NO: 13768 - DNA, 25 bp, synthetic construct
  source 1..25: mol_type = other DNA; mol_type = other DNA
gccgcagcgttggctctgcggcgga

SEQ ID NO: 13769 - DNA, 25 bp, synthetic construct
  source 1..25: mol_type = other DNA; mol_type = other DNA
agccgcagcgttggctctgcggcgg

SEQ ID NO: 13770 - DNA, 25 bp, synthetic construct
  source 1..25: mol_type = other DNA; mol_type = other DNA
gaccgcagcgttggctctgcggcgg

SEQ ID NO: 13771 - DNA, 25 bp, synthetic construct
  source 1..25: mol_type = other DNA; mol_type = other DNA
ggacgcagcgttggctctgcggcgg

SEQ ID NO: 13772 - DNA, 25 bp, synthetic construct
  source 1..25: mol_type = other DNA; mol_type = other DNA
ggcagcagcgttggctctgcggcgg

SEQ ID NO: 13773 - DNA, 25 bp, synthetic construct
  source 1..25: mol_type = other DNA; mol_type = other DNA
ggccacagcgttggctctgcggcgg

SEQ ID NO: 13774 - DNA, 25 bp, synthetic construct
  source 1..25: mol_type = other DNA; mol_type = other DNA
ggccgaagcgttggctctgcggcgg

SEQ ID NO: 13775 - DNA, 25 bp, synthetic construct
  source 1..25: mol_type = other DNA; mol_type = other DNA
ggccgcaacgttggctctgcggcgg

SEQ ID NO: 13776 - DNA, 25 bp, synthetic construct
  source 1..25: mol_type = other DNA; mol_type = other DNA
ggccgcagagttggctctgcggcgg

SEQ ID NO: 13777 - DNA, 25 bp, synthetic construct
  source 1..25: mol_type = other DNA; mol_type = other DNA
ggccgcagcattggctctgcggcgg

SEQ ID NO: 13778 - DNA, 25 bp, synthetic construct
  source 1..25: mol_type = other DNA; mol_type = other DNA
ggccgcagcgttagctctgcggcgg

SEQ ID NO: 13779 - DNA, 25 bp, synthetic construct
  source 1..25: mol_type = other DNA; mol_type = other DNA
ggccgcagcgttgactctgcggcgg

SEQ ID NO: 13780 - DNA, 25 bp, synthetic construct
  source 1..25: mol_type = other DNA; mol_type = other DNA
ggccgcagcgttggatctgcggcgg

SEQ ID NO: 13781 - DNA, 25 bp, synthetic construct
  source 1..25: mol_type = other DNA; mol_type = other DNA
ggccgcagcgttggctatgcggcgg

SEQ ID NO: 13782 - DNA, 25 bp, synthetic construct
  source 1..25: mol_type = other DNA; mol_type = other DNA
ggccgcagcgttggctctacggcgg

SEQ ID NO: 13783 - DNA, 25 bp, synthetic construct
  source 1..25: mol_type = other DNA; mol_type = other DNA
ggccgcagcgttggctctgaggcgg

SEQ ID NO: 13784 - DNA, 25 bp, synthetic construct
  source 1..25: mol_type = other DNA; mol_type = other DNA
ggccgcagcgttggctctgcagcgg

SEQ ID NO: 13785 - DNA, 25 bp, synthetic construct
  source 1..25: mol_type = other DNA; mol_type = other DNA
ggccgcagcgttggctctgcgacgg

SEQ ID NO: 13786 - DNA, 25 bp, synthetic construct
  source 1..25: mol_type = other DNA; mol_type = other DNA
ggccgcagcgttggctctgcggagg

SEQ ID NO: 13787 - DNA, 25 bp, synthetic construct
  source 1..25: mol_type = other DNA; mol_type = other DNA
ggccgcagcgttggctctgcggcag

SEQ ID NO: 13788 - DNA, 25 bp, synthetic construct
  source 1..25: mol_type = other DNA; mol_type = other DNA
tagccgcagcgttggctctgcggcg

SEQ ID NO: 13789 - DNA, 25 bp, synthetic construct
  source 1..25: mol_type = other DNA; mol_type = other DNA
tgaccgcagcgttggctctgcggcg

SEQ ID NO: 13790 - DNA, 25 bp, synthetic construct
  source 1..25: mol_type = other DNA; mol_type = other DNA
tggacgcagcgttggctctgcggcg

SEQ ID NO: 13791 - DNA, 25 bp, synthetic construct
  source 1..25: mol_type = other DNA; mol_type = other DNA
tggcagcagcgttggctctgcggcg

SEQ ID NO: 13792 - DNA, 25 bp, synthetic construct
  source 1..25: mol_type = other DNA; mol_type = other DNA
tggccacagcgttggctctgcggcg

SEQ ID NO: 13793 - DNA, 25 bp, synthetic construct
  source 1..25: mol_type = other DNA; mol_type = other DNA
tggccgaagcgttggctctgcggcg

SEQ ID NO: 13794 - DNA, 25 bp, synthetic construct
  source 1..25: mol_type = other DNA; mol_type = other DNA
tggccgcaacgttggctctgcggcg

SEQ ID NO: 13795 - DNA, 25 bp, synthetic construct
  source 1..25: mol_type = other DNA; mol_type = other DNA
tggccgcagagttggctctgcggcg

SEQ ID NO: 13796 - DNA, 25 bp, synthetic construct
  source 1..25: mol_type = other DNA; mol_type = other DNA
tggccgcagcattggctctgcggcg

SEQ ID NO: 13797 - DNA, 25 bp, synthetic construct
  source 1..25: mol_type = other DNA; mol_type = other DNA
tggccgcagcgttagctctgcggcg

SEQ ID NO: 13798 - DNA, 25 bp, synthetic construct
  source 1..25: mol_type = other DNA; mol_type = other DNA
tggccgcagcgttgactctgcggcg

SEQ ID NO: 13799 - DNA, 25 bp, synthetic construct
  source 1..25: mol_type = other DNA; mol_type = other DNA
tggccgcagcgttggatctgcggcg

SEQ ID NO: 13800 - DNA, 25 bp, synthetic construct
  source 1..25: mol_type = other DNA; mol_type = other DNA
tggccgcagcgttggctatgcggcg

SEQ ID NO: 13801 - DNA, 25 bp, synthetic construct
  source 1..25: mol_type = other DNA; mol_type = other DNA
tggccgcagcgttggctctacggcg

SEQ ID NO: 13802 - DNA, 25 bp, synthetic construct
  source 1..25: mol_type = other DNA; mol_type = other DNA
tggccgcagcgttggctctgaggcg

SEQ ID NO: 13803 - DNA, 25 bp, synthetic construct
  source 1..25: mol_type = other DNA; mol_type = other DNA
tggccgcagcgttggctctgcagcg

SEQ ID NO: 13804 - DNA, 25 bp, synthetic construct
  source 1..25: mol_type = other DNA; mol_type = other DNA
tggccgcagcgttggctctgcgacg

SEQ ID NO: 13805 - DNA, 25 bp, synthetic construct
  source 1..25: mol_type = other DNA; mol_type = other DNA
tggccgcagcgttggctctgcggag

SEQ ID NO: 13806 - DNA, 25 bp, synthetic construct
  source 1..25: mol_type = other DNA; mol_type = other DNA
atggccgcagcgttggctctgcggc

SEQ ID NO: 13807 - DNA, 25 bp, synthetic construct
  source 1..25: mol_type = other DNA; mol_type = other DNA
ctagccgcagcgttggctctgcggc

SEQ ID NO: 13808 - DNA, 25 bp, synthetic construct
  source 1..25: mol_type = other DNA; mol_type = other DNA
ctgaccgcagcgttggctctgcggc

SEQ ID NO: 13809 - DNA, 25 bp, synthetic construct
  source 1..25: mol_type = other DNA; mol_type = other DNA
ctggacgcagcgttggctctgcggc

SEQ ID NO: 13810 - DNA, 25 bp, synthetic construct
  source 1..25: mol_type = other DNA; mol_type = other DNA
ctggcagcagcgttggctctgcggc

SEQ ID NO: 13811 - DNA, 25 bp, synthetic construct
  source 1..25: mol_type = other DNA; mol_type = other DNA
ctggccacagcgttggctctgcggc

SEQ ID NO: 13812 - DNA, 25 bp, synthetic construct
  source 1..25: mol_type = other DNA; mol_type = other DNA
ctggccgaagcgttggctctgcggc

SEQ ID NO: 13813 - DNA, 25 bp, synthetic construct
  source 1..25: mol_type = other DNA; mol_type = other DNA
ctggccgcaacgttggctctgcggc

SEQ ID NO: 13814 - DNA, 25 bp, synthetic construct
  source 1..25: mol_type = other DNA; mol_type = other DNA
ctggccgcagagttggctctgcggc

SEQ ID NO: 13815 - DNA, 25 bp, synthetic construct
  source 1..25: mol_type = other DNA; mol_type = other DNA
ctggccgcagcattggctctgcggc

SEQ ID NO: 13816 - DNA, 25 bp, synthetic construct
  source 1..25: mol_type = other DNA; mol_type = other DNA
ctggccgcagcgttagctctgcggc

SEQ ID NO: 13817 - DNA, 25 bp, synthetic construct
  source 1..25: mol_type = other DNA; mol_type = other DNA
ctggccgcagcgttgactctgcggc

SEQ ID NO: 13818 - DNA, 25 bp, synthetic construct
  source 1..25: mol_type = other DNA; mol_type = other DNA
ctggccgcagcgttggatctgcggc

SEQ ID NO: 13819 - DNA, 25 bp, synthetic construct
  source 1..25: mol_type = other DNA; mol_type = other DNA
ctggccgcagcgttggctatgcggc

SEQ ID NO: 13820 - DNA, 25 bp, synthetic construct
  source 1..25: mol_type = other DNA; mol_type = other DNA
ctggccgcagcgttggctctacggc

SEQ ID NO: 13821 - DNA, 25 bp, synthetic construct
  source 1..25: mol_type = other DNA; mol_type = other DNA
ctggccgcagcgttggctctgaggc

SEQ ID NO: 13822 - DNA, 25 bp, synthetic construct
  source 1..25: mol_type = other DNA; mol_type = other DNA
ctggccgcagcgttggctctgcagc

SEQ ID NO: 13823 - DNA, 25 bp, synthetic construct
  source 1..25: mol_type = other DNA; mol_type = other DNA
ctggccgcagcgttggctctgcgga

SEQ ID NO: 13824 - DNA, 25 bp, synthetic construct
  source 1..25: mol_type = other DNA; mol_type = other DNA
tatggccgcagcgttggctctgcgg

SEQ ID NO: 13825 - DNA, 25 bp, synthetic construct
  source 1..25: mol_type = other DNA; mol_type = other DNA
tctagccgcagcgttggctctgcgg

SEQ ID NO: 13826 - DNA, 25 bp, synthetic construct
  source 1..25: mol_type = other DNA; mol_type = other DNA
tctgaccgcagcgttggctctgcgg

SEQ ID NO: 13827 - DNA, 25 bp, synthetic construct
  source 1..25: mol_type = other DNA; mol_type = other DNA
tctggacgcagcgttggctctgcgg

SEQ ID NO: 13828 - DNA, 25 bp, synthetic construct
  source 1..25: mol_type = other DNA; mol_type = other DNA
tctggcagcagcgttggctctgcgg

SEQ ID NO: 13829 - DNA, 25 bp, synthetic construct
  source 1..25: mol_type = other DNA; mol_type = other DNA
tctggccacagcgttggctctgcgg

SEQ ID NO: 13830 - DNA, 25 bp, synthetic construct
  source 1..25: mol_type = other DNA; mol_type = other DNA
tctggccgaagcgttggctctgcgg

SEQ ID NO: 13831 - DNA, 25 bp, synthetic construct
  source 1..25: mol_type = other DNA; mol_type = other DNA
tctggccgcaacgttggctctgcgg

SEQ ID NO: 13832 - DNA, 25 bp, synthetic construct
  source 1..25: mol_type = other DNA; mol_type = other DNA
tctggccgcagagttggctctgcgg

SEQ ID NO: 13833 - DNA, 25 bp, synthetic construct
  source 1..25: mol_type = other DNA; mol_type = other DNA
tctggccgcagcattggctctgcgg

SEQ ID NO: 13834 - DNA, 25 bp, synthetic construct
  source 1..25: mol_type = other DNA; mol_type = other DNA
tctggccgcagcgttagctctgcgg

SEQ ID NO: 13835 - DNA, 25 bp, synthetic construct
  source 1..25: mol_type = other DNA; mol_type = other DNA
tctggccgcagcgttgactctgcgg

SEQ ID NO: 13836 - DNA, 25 bp, synthetic construct
  source 1..25: mol_type = other DNA; mol_type = other DNA
tctggccgcagcgttggatctgcgg

SEQ ID NO: 13837 - DNA, 25 bp, synthetic construct
  source 1..25: mol_type = other DNA; mol_type = other DNA
tctggccgcagcgttggctatgcgg

SEQ ID NO: 13838 - DNA, 25 bp, synthetic construct
  source 1..25: mol_type = other DNA; mol_type = other DNA
tctggccgcagcgttggctctacgg

SEQ ID NO: 13839 - DNA, 25 bp, synthetic construct
  source 1..25: mol_type = other DNA; mol_type = other DNA
tctggccgcagcgttggctctgagg

SEQ ID NO: 13840 - DNA, 25 bp, synthetic construct
  source 1..25: mol_type = other DNA; mol_type = other DNA
tctggccgcagcgttggctctgcag

SEQ ID NO: 13841 - DNA, 25 bp, synthetic construct
  source 1..25: mol_type = other DNA; mol_type = other DNA
atctggccgcagcgttggctctgcg

SEQ ID NO: 13842 - DNA, 25 bp, synthetic construct
  source 1..25: mol_type = other DNA; mol_type = other DNA
gtatggccgcagcgttggctctgcg

SEQ ID NO: 13843 - DNA, 25 bp, synthetic construct
  source 1..25: mol_type = other DNA; mol_type = other DNA
gtctagccgcagcgttggctctgcg

SEQ ID NO: 13844 - DNA, 25 bp, synthetic construct
  source 1..25: mol_type = other DNA; mol_type = other DNA
gtctgaccgcagcgttggctctgcg

SEQ ID NO: 13845 - DNA, 25 bp, synthetic construct
  source 1..25: mol_type = other DNA; mol_type = other DNA
gtctggacgcagcgttggctctgcg

SEQ ID NO: 13846 - DNA, 25 bp, synthetic construct
  source 1..25: mol_type = other DNA; mol_type = other DNA
gtctggcagcagcgttggctctgcg

SEQ ID NO: 13847 - DNA, 25 bp, synthetic construct
  source 1..25: mol_type = other DNA; mol_type = other DNA
gtctggccacagcgttggctctgcg

SEQ ID NO: 13848 - DNA, 25 bp, synthetic construct
  source 1..25: mol_type = other DNA; mol_type = other DNA
gtctggccgaagcgttggctctgcg

SEQ ID NO: 13849 - DNA, 25 bp, synthetic construct
  source 1..25: mol_type = other DNA; mol_type = other DNA
gtctggccgcaacgttggctctgcg

SEQ ID NO: 13850 - DNA, 25 bp, synthetic construct
  source 1..25: mol_type = other DNA; mol_type = other DNA
gtctggccgcagagttggctctgcg

SEQ ID NO: 13851 - DNA, 25 bp, synthetic construct
  source 1..25: mol_type = other DNA; mol_type = other DNA
gtctggccgcagcattggctctgcg

SEQ ID NO: 13852 - DNA, 25 bp, synthetic construct
  source 1..25: mol_type = other DNA; mol_type = other DNA
gtctggccgcagcgttagctctgcg

SEQ ID NO: 13853 - DNA, 25 bp, synthetic construct
  source 1..25: mol_type = other DNA; mol_type = other DNA
gtctggccgcagcgttgactctgcg

SEQ ID NO: 13854 - DNA, 25 bp, synthetic construct
  source 1..25: mol_type = other DNA; mol_type = other DNA
gtctggccgcagcgttggatctgcg

SEQ ID NO: 13855 - DNA, 25 bp, synthetic construct
  source 1..25: mol_type = other DNA; mol_type = other DNA
gtctggccgcagcgttggctatgcg

SEQ ID NO: 13856 - DNA, 25 bp, synthetic construct
  source 1..25: mol_type = other DNA; mol_type = other DNA
gtctggccgcagcgttggctctacg

SEQ ID NO: 13857 - DNA, 25 bp, synthetic construct
  source 1..25: mol_type = other DNA; mol_type = other DNA
gtctggccgcagcgttggctctgag

SEQ ID NO: 13858 - DNA, 25 bp, synthetic construct
  source 1..25: mol_type = other DNA; mol_type = other DNA
tatctggccgcagcgttggctctgc

SEQ ID NO: 13859 - DNA, 25 bp, synthetic construct
  source 1..25: mol_type = other DNA; mol_type = other DNA
tgtatggccgcagcgttggctctgc

SEQ ID NO: 13860 - DNA, 25 bp, synthetic construct
  source 1..25: mol_type = other DNA; mol_type = other DNA
tgtctagccgcagcgttggctctgc

SEQ ID NO: 13861 - DNA, 25 bp, synthetic construct
  source 1..25: mol_type = other DNA; mol_type = other DNA
tgtctgaccgcagcgttggctctgc

SEQ ID NO: 13862 - DNA, 25 bp, synthetic construct
  source 1..25: mol_type = other DNA; mol_type = other DNA
tgtctggacgcagcgttggctctgc

SEQ ID NO: 13863 - DNA, 25 bp, synthetic construct
  source 1..25: mol_type = other DNA; mol_type = other DNA
tgtctggcagcagcgttggctctgc

SEQ ID NO: 13864 - DNA, 25 bp, synthetic construct
  source 1..25: mol_type = other DNA; mol_type = other DNA
tgtctggccacagcgttggctctgc

SEQ ID NO: 13865 - DNA, 25 bp, synthetic construct
  source 1..25: mol_type = other DNA; mol_type = other DNA
tgtctggccgaagcgttggctctgc

SEQ ID NO: 13866 - DNA, 25 bp, synthetic construct
  source 1..25: mol_type = other DNA; mol_type = other DNA
tgtctggccgcaacgttggctctgc

SEQ ID NO: 13867 - DNA, 25 bp, synthetic construct
  source 1..25: mol_type = other DNA; mol_type = other DNA
tgtctggccgcagagttggctctgc

SEQ ID NO: 13868 - DNA, 25 bp, synthetic construct
  source 1..25: mol_type = other DNA; mol_type = other DNA
tgtctggccgcagcattggctctgc

SEQ ID NO: 13869 - DNA, 25 bp, synthetic construct
  source 1..25: mol_type = other DNA; mol_type = other DNA
tgtctggccgcagcgttagctctgc

SEQ ID NO: 13870 - DNA, 25 bp, synthetic construct
  source 1..25: mol_type = other DNA; mol_type = other DNA
tgtctggccgcagcgttgactctgc

SEQ ID NO: 13871 - DNA, 25 bp, synthetic construct
  source 1..25: mol_type = other DNA; mol_type = other DNA
tgtctggccgcagcgttggatctgc

SEQ ID NO: 13872 - DNA, 25 bp, synthetic construct
  source 1..25: mol_type = other DNA; mol_type = other DNA
tgtctggccgcagcgttggctatgc

SEQ ID NO: 13873 - DNA, 25 bp, synthetic construct
  source 1..25: mol_type = other DNA; mol_type = other DNA
tgtctggccgcagcgttggctctga

SEQ ID NO: 13874 - DNA, 25 bp, synthetic construct
  source 1..25: mol_type = other DNA; mol_type = other DNA
atatctggccgcagcgttggctctg

SEQ ID NO: 13875 - DNA, 25 bp, synthetic construct
  source 1..25: mol_type = other DNA; mol_type = other DNA
atgtatggccgcagcgttggctctg

SEQ ID NO: 13876 - DNA, 25 bp, synthetic construct
  source 1..25: mol_type = other DNA; mol_type = other DNA
atgtctagccgcagcgttggctctg

SEQ ID NO: 13877 - DNA, 25 bp, synthetic construct
  source 1..25: mol_type = other DNA; mol_type = other DNA
atgtctgaccgcagcgttggctctg

SEQ ID NO: 13878 - DNA, 25 bp, synthetic construct
  source 1..25: mol_type = other DNA; mol_type = other DNA
atgtctggacgcagcgttggctctg

SEQ ID NO: 13879 - DNA, 25 bp, synthetic construct
  source 1..25: mol_type = other DNA; mol_type = other DNA
atgtctggcagcagcgttggctctg

SEQ ID NO: 13880 - DNA, 25 bp, synthetic construct
  source 1..25: mol_type = other DNA; mol_type = other DNA
atgtctggccacagcgttggctctg

SEQ ID NO: 13881 - DNA, 25 bp, synthetic construct
  source 1..25: mol_type = other DNA; mol_type = other DNA
atgtctggccgaagcgttggctctg

SEQ ID NO: 13882 - DNA, 25 bp, synthetic construct
  source 1..25: mol_type = other DNA; mol_type = other DNA
atgtctggccgcaacgttggctctg

SEQ ID NO: 13883 - DNA, 25 bp, synthetic construct
  source 1..25: mol_type = other DNA; mol_type = other DNA
atgtctggccgcagagttggctctg

SEQ ID NO: 13884 - DNA, 25 bp, synthetic construct
  source 1..25: mol_type = other DNA; mol_type = other DNA
atgtctggccgcagcattggctctg

SEQ ID NO: 13885 - DNA, 25 bp, synthetic construct
  source 1..25: mol_type = other DNA; mol_type = other DNA
atgtctggccgcagcgttagctctg

SEQ ID NO: 13886 - DNA, 25 bp, synthetic construct
  source 1..25: mol_type = other DNA; mol_type = other DNA
atgtctggccgcagcgttgactctg

SEQ ID NO: 13887 - DNA, 25 bp, synthetic construct
  source 1..25: mol_type = other DNA; mol_type = other DNA
atgtctggccgcagcgttggatctg

SEQ ID NO: 13888 - DNA, 25 bp, synthetic construct
  source 1..25: mol_type = other DNA; mol_type = other DNA
atgtctggccgcagcgttggctatg

SEQ ID NO: 13889 - DNA, 25 bp, synthetic construct
  source 1..25: mol_type = other DNA; mol_type = other DNA
aatgtctggccgcagcgttggctct

SEQ ID NO: 13890 - DNA, 25 bp, synthetic construct
  source 1..25: mol_type = other DNA; mol_type = other DNA
gatatctggccgcagcgttggctct

SEQ ID NO: 13891 - DNA, 25 bp, synthetic construct
  source 1..25: mol_type = other DNA; mol_type = other DNA
gatgtatggccgcagcgttggctct

SEQ ID NO: 13892 - DNA, 25 bp, synthetic construct
  source 1..25: mol_type = other DNA; mol_type = other DNA
gatgtctagccgcagcgttggctct

SEQ ID NO: 13893 - DNA, 25 bp, synthetic construct
  source 1..25: mol_type = other DNA; mol_type = other DNA
gatgtctgaccgcagcgttggctct

SEQ ID NO: 13894 - DNA, 25 bp, synthetic construct
  source 1..25: mol_type = other DNA; mol_type = other DNA
gatgtctggacgcagcgttggctct

SEQ ID NO: 13895 - DNA, 25 bp, synthetic construct
  source 1..25: mol_type = other DNA; mol_type = other DNA
gatgtctggcagcagcgttggctct

SEQ ID NO: 13896 - DNA, 25 bp, synthetic construct
  source 1..25: mol_type = other DNA; mol_type = other DNA
gatgtctggccacagcgttggctct

SEQ ID NO: 13897 - DNA, 25 bp, synthetic construct
  source 1..25: mol_type = other DNA; mol_type = other DNA
gatgtctggccgaagcgttggctct

SEQ ID NO: 13898 - DNA, 25 bp, synthetic construct
  source 1..25: mol_type = other DNA; mol_type = other DNA
gatgtctggccgcaacgttggctct

SEQ ID NO: 13899 - DNA, 25 bp, synthetic construct
  source 1..25: mol_type = other DNA; mol_type = other DNA
gatgtctggccgcagagttggctct

SEQ ID NO: 13900 - DNA, 25 bp, synthetic construct
  source 1..25: mol_type = other DNA; mol_type = other DNA
gatgtctggccgcagcattggctct

SEQ ID NO: 13901 - DNA, 25 bp, synthetic construct
  source 1..25: mol_type = other DNA; mol_type = other DNA
gatgtctggccgcagcgttagctct

SEQ ID NO: 13902 - DNA, 25 bp, synthetic construct
  source 1..25: mol_type = other DNA; mol_type = other DNA
gatgtctggccgcagcgttggatct

SEQ ID NO: 13903 - DNA, 25 bp, synthetic construct
  source 1..25: mol_type = other DNA; mol_type = other DNA
gatgtctggccgcagcgttggctat

SEQ ID NO: 13904 - DNA, 25 bp, synthetic construct
  source 1..25: mol_type = other DNA; mol_type = other DNA
agatgtctggccgcagcgttggctc

SEQ ID NO: 13905 - DNA, 25 bp, synthetic construct
  source 1..25: mol_type = other DNA; mol_type = other DNA
caatgtctggccgcagcgttggctc

SEQ ID NO: 13906 - DNA, 25 bp, synthetic construct
  source 1..25: mol_type = other DNA; mol_type = other DNA
cgatatctggccgcagcgttggctc

SEQ ID NO: 13907 - DNA, 25 bp, synthetic construct
  source 1..25: mol_type = other DNA; mol_type = other DNA
cgatgtatggccgcagcgttggctc

SEQ ID NO: 13908 - DNA, 25 bp, synthetic construct
  source 1..25: mol_type = other DNA; mol_type = other DNA
cgatgtctagccgcagcgttggctc

SEQ ID NO: 13909 - DNA, 25 bp, synthetic construct
  source 1..25: mol_type = other DNA; mol_type = other DNA
cgatgtctgaccgcagcgttggctc

SEQ ID NO: 13910 - DNA, 25 bp, synthetic construct
  source 1..25: mol_type = other DNA; mol_type = other DNA
cgatgtctggacgcagcgttggctc

SEQ ID NO: 13911 - DNA, 25 bp, synthetic construct
  source 1..25: mol_type = other DNA; mol_type = other DNA
cgatgtctggcagcagcgttggctc

SEQ ID NO: 13912 - DNA, 25 bp, synthetic construct
  source 1..25: mol_type = other DNA; mol_type = other DNA
cgatgtctggccacagcgttggctc

SEQ ID NO: 13913 - DNA, 25 bp, synthetic construct
  source 1..25: mol_type = other DNA; mol_type = other DNA
cgatgtctggccgaagcgttggctc

SEQ ID NO: 13914 - DNA, 25 bp, synthetic construct
  source 1..25: mol_type = other DNA; mol_type = other DNA
cgatgtctggccgcaacgttggctc

SEQ ID NO: 13915 - DNA, 25 bp, synthetic construct
  source 1..25: mol_type = other DNA; mol_type = other DNA
cgatgtctggccgcagagttggctc

SEQ ID NO: 13916 - DNA, 25 bp, synthetic construct
  source 1..25: mol_type = other DNA; mol_type = other DNA
cgatgtctggccgcagcattggctc

SEQ ID NO: 13917 - DNA, 25 bp, synthetic construct
  source 1..25: mol_type = other DNA; mol_type = other DNA
cgatgtctggccgcagcgttagctc

SEQ ID NO: 13918 - DNA, 25 bp, synthetic construct
  source 1..25: mol_type = other DNA; mol_type = other DNA
cgatgtctggccgcagcgttggatc

SEQ ID NO: 13919 - DNA, 25 bp, synthetic construct
  source 1..25: mol_type = other DNA; mol_type = other DNA
cgatgtctggccgcagcgttggcta

SEQ ID NO: 13920 - DNA, 25 bp, synthetic construct
  source 1..25: mol_type = other DNA; mol_type = other DNA
acgatgtctggccgcagcgttggct

SEQ ID NO: 13921 - DNA, 25 bp, synthetic construct
  source 1..25: mol_type = other DNA; mol_type = other DNA
gagatgtctggccgcagcgttggct

SEQ ID NO: 13922 - DNA, 25 bp, synthetic construct
  source 1..25: mol_type = other DNA; mol_type = other DNA
gcaatgtctggccgcagcgttggct

SEQ ID NO: 13923 - DNA, 25 bp, synthetic construct
  source 1..25: mol_type = other DNA; mol_type = other DNA
gcgatatctggccgcagcgttggct

SEQ ID NO: 13924 - DNA, 25 bp, synthetic construct
  source 1..25: mol_type = other DNA; mol_type = other DNA
gcgatgtatggccgcagcgttggct

SEQ ID NO: 13925 - DNA, 25 bp, synthetic construct
  source 1..25: mol_type = other DNA; mol_type = other DNA
gcgatgtctagccgcagcgttggct

SEQ ID NO: 13926 - DNA, 25 bp, synthetic construct
  source 1..25: mol_type = other DNA; mol_type = other DNA
gcgatgtctgaccgcagcgttggct

SEQ ID NO: 13927 - DNA, 25 bp, synthetic construct
  source 1..25: mol_type = other DNA; mol_type = other DNA
gcgatgtctggacgcagcgttggct

SEQ ID NO: 13928 - DNA, 25 bp, synthetic construct
  source 1..25: mol_type = other DNA; mol_type = other DNA
gcgatgtctggcagcagcgttggct

SEQ ID NO: 13929 - DNA, 25 bp, synthetic construct
  source 1..25: mol_type = other DNA; mol_type = other DNA
gcgatgtctggccacagcgttggct

SEQ ID NO: 13930 - DNA, 25 bp, synthetic construct
  source 1..25: mol_type = other DNA; mol_type = other DNA
gcgatgtctggccgaagcgttggct

SEQ ID NO: 13931 - DNA, 25 bp, synthetic construct
  source 1..25: mol_type = other DNA; mol_type = other DNA
gcgatgtctggccgcaacgttggct

SEQ ID NO: 13932 - DNA, 25 bp, synthetic construct
  source 1..25: mol_type = other DNA; mol_type = other DNA
gcgatgtctggccgcagagttggct

SEQ ID NO: 13933 - DNA, 25 bp, synthetic construct
  source 1..25: mol_type = other DNA; mol_type = other DNA
gcgatgtctggccgcagcattggct

SEQ ID NO: 13934 - DNA, 25 bp, synthetic construct
  source 1..25: mol_type = other DNA; mol_type = other DNA
gcgatgtctggccgcagcgttagct

SEQ ID NO: 13935 - DNA, 25 bp, synthetic construct
  source 1..25: mol_type = other DNA; mol_type = other DNA
gcgatgtctggccgcagcgttggat

SEQ ID NO: 13936 - DNA, 25 bp, synthetic construct
  source 1..25: mol_type = other DNA; mol_type = other DNA
tacgatgtctggccgcagcgttggc

SEQ ID NO: 13937 - DNA, 25 bp, synthetic construct
  source 1..25: mol_type = other DNA; mol_type = other DNA
tgagatgtctggccgcagcgttggc

SEQ ID NO: 13938 - DNA, 25 bp, synthetic construct
  source 1..25: mol_type = other DNA; mol_type = other DNA
tgcaatgtctggccgcagcgttggc

SEQ ID NO: 13939 - DNA, 25 bp, synthetic construct
  source 1..25: mol_type = other DNA; mol_type = other DNA
tgcgatatctggccgcagcgttggc

SEQ ID NO: 13940 - DNA, 25 bp, synthetic construct
  source 1..25: mol_type = other DNA; mol_type = other DNA
tgcgatgtatggccgcagcgttggc

SEQ ID NO: 13941 - DNA, 25 bp, synthetic construct
  source 1..25: mol_type = other DNA; mol_type = other DNA
tgcgatgtctagccgcagcgttggc

SEQ ID NO: 13942 - DNA, 25 bp, synthetic construct
  source 1..25: mol_type = other DNA; mol_type = other DNA
tgcgatgtctgaccgcagcgttggc

SEQ ID NO: 13943 - DNA, 25 bp, synthetic construct
  source 1..25: mol_type = other DNA; mol_type = other DNA
tgcgatgtctggacgcagcgttggc

SEQ ID NO: 13944 - DNA, 25 bp, synthetic construct
  source 1..25: mol_type = other DNA; mol_type = other DNA
tgcgatgtctggcagcagcgttggc

SEQ ID NO: 13945 - DNA, 25 bp, synthetic construct
  source 1..25: mol_type = other DNA; mol_type = other DNA
tgcgatgtctggccacagcgttggc

SEQ ID NO: 13946 - DNA, 25 bp, synthetic construct
  source 1..25: mol_type = other DNA; mol_type = other DNA
tgcgatgtctggccgaagcgttggc

SEQ ID NO: 13947 - DNA, 25 bp, synthetic construct
  source 1..25: mol_type = other DNA; mol_type = other DNA
tgcgatgtctggccgcaacgttggc

SEQ ID NO: 13948 - DNA, 25 bp, synthetic construct
  source 1..25: mol_type = other DNA; mol_type = other DNA
tgcgatgtctggccgcagagttggc

SEQ ID NO: 13949 - DNA, 25 bp, synthetic construct
  source 1..25: mol_type = other DNA; mol_type = other DNA
tgcgatgtctggccgcagcattggc

SEQ ID NO: 13950 - DNA, 25 bp, synthetic construct
  source 1..25: mol_type = other DNA; mol_type = other DNA
tgcgatgtctggccgcagcgttagc

SEQ ID NO: 13951 - DNA, 25 bp, synthetic construct
  source 1..25: mol_type = other DNA; mol_type = other DNA
tgcgatgtctggccgcagcgttgga

SEQ ID NO: 13952 - DNA, 25 bp, synthetic construct
  source 1..25: mol_type = other DNA; mol_type = other DNA
atgcgatgtctggccgcagcgttgg

SEQ ID NO: 13953 - DNA, 25 bp, synthetic construct
  source 1..25: mol_type = other DNA; mol_type = other DNA
ctacgatgtctggccgcagcgttgg

SEQ ID NO: 13954 - DNA, 25 bp, synthetic construct
  source 1..25: mol_type = other DNA; mol_type = other DNA
ctgagatgtctggccgcagcgttgg

SEQ ID NO: 13955 - DNA, 25 bp, synthetic construct
  source 1..25: mol_type = other DNA; mol_type = other DNA
ctgcaatgtctggccgcagcgttgg

SEQ ID NO: 13956 - DNA, 25 bp, synthetic construct
  source 1..25: mol_type = other DNA; mol_type = other DNA
ctgcgatatctggccgcagcgttgg

SEQ ID NO: 13957 - DNA, 25 bp, synthetic construct
  source 1..25: mol_type = other DNA; mol_type = other DNA
ctgcgatgtatggccgcagcgttgg

SEQ ID NO: 13958 - DNA, 25 bp, synthetic construct
  source 1..25: mol_type = other DNA; mol_type = other DNA
ctgcgatgtctagccgcagcgttgg

SEQ ID NO: 13959 - DNA, 25 bp, synthetic construct
  source 1..25: mol_type = other DNA; mol_type = other DNA
ctgcgatgtctgaccgcagcgttgg

SEQ ID NO: 13960 - DNA, 25 bp, synthetic construct
  source 1..25: mol_type = other DNA; mol_type = other DNA
ctgcgatgtctggacgcagcgttgg

SEQ ID NO: 13961 - DNA, 25 bp, synthetic construct
  source 1..25: mol_type = other DNA; mol_type = other DNA
ctgcgatgtctggcagcagcgttgg

SEQ ID NO: 13962 - DNA, 25 bp, synthetic construct
  source 1..25: mol_type = other DNA; mol_type = other DNA
ctgcgatgtctggccacagcgttgg

SEQ ID NO: 13963 - DNA, 25 bp, synthetic construct
  source 1..25: mol_type = other DNA; mol_type = other DNA
ctgcgatgtctggccgaagcgttgg

SEQ ID NO: 13964 - DNA, 25 bp, synthetic construct
  source 1..25: mol_type = other DNA; mol_type = other DNA
ctgcgatgtctggccgcaacgttgg

SEQ ID NO: 13965 - DNA, 25 bp, synthetic construct
  source 1..25: mol_type = other DNA; mol_type = other DNA
ctgcgatgtctggccgcagagttgg

SEQ ID NO: 13966 - DNA, 25 bp, synthetic construct
  source 1..25: mol_type = other DNA; mol_type = other DNA
ctgcgatgtctggccgcagcattgg

SEQ ID NO: 13967 - DNA, 25 bp, synthetic construct
  source 1..25: mol_type = other DNA; mol_type = other DNA
ctgcgatgtctggccgcagcgttag

SEQ ID NO: 13968 - DNA, 25 bp, synthetic construct
  source 1..25: mol_type = other DNA; mol_type = other DNA
tatgcgatgtctggccgcagcgttg

SEQ ID NO: 13969 - DNA, 25 bp, synthetic construct
  source 1..25: mol_type = other DNA; mol_type = other DNA
tctacgatgtctggccgcagcgttg

SEQ ID NO: 13970 - DNA, 25 bp, synthetic construct
  source 1..25: mol_type = other DNA; mol_type = other DNA
tctgagatgtctggccgcagcgttg

SEQ ID NO: 13971 - DNA, 25 bp, synthetic construct
  source 1..25: mol_type = other DNA; mol_type = other DNA
tctgcaatgtctggccgcagcgttg

SEQ ID NO: 13972 - DNA, 25 bp, synthetic construct
  source 1..25: mol_type = other DNA; mol_type = other DNA
tctgcgatatctggccgcagcgttg

SEQ ID NO: 13973 - DNA, 25 bp, synthetic construct
  source 1..25: mol_type = other DNA; mol_type = other DNA
tctgcgatgtatggccgcagcgttg

SEQ ID NO: 13974 - DNA, 25 bp, synthetic construct
  source 1..25: mol_type = other DNA; mol_type = other DNA
tctgcgatgtctagccgcagcgttg

SEQ ID NO: 13975 - DNA, 25 bp, synthetic construct
  source 1..25: mol_type = other DNA; mol_type = other DNA
tctgcgatgtctgaccgcagcgttg

SEQ ID NO: 13976 - DNA, 25 bp, synthetic construct
  source 1..25: mol_type = other DNA; mol_type = other DNA
tctgcgatgtctggacgcagcgttg

SEQ ID NO: 13977 - DNA, 25 bp, synthetic construct
  source 1..25: mol_type = other DNA; mol_type = other DNA
tctgcgatgtctggcagcagcgttg

SEQ ID NO: 13978 - DNA, 25 bp, synthetic construct
  source 1..25: mol_type = other DNA; mol_type = other DNA
tctgcgatgtctggccacagcgttg

SEQ ID NO: 13979 - DNA, 25 bp, synthetic construct
  source 1..25: mol_type = other DNA; mol_type = other DNA
tctgcgatgtctggccgaagcgttg

SEQ ID NO: 13980 - DNA, 25 bp, synthetic construct
  source 1..25: mol_type = other DNA; mol_type = other DNA
tctgcgatgtctggccgcaacgttg

SEQ ID NO: 13981 - DNA, 25 bp, synthetic construct
  source 1..25: mol_type = other DNA; mol_type = other DNA
tctgcgatgtctggccgcagagttg

SEQ ID NO: 13982 - DNA, 25 bp, synthetic construct
  source 1..25: mol_type = other DNA; mol_type = other DNA
tctgcgatgtctggccgcagcattg

SEQ ID NO: 13983 - DNA, 25 bp, synthetic construct
  source 1..25: mol_type = other DNA; mol_type = other DNA
atctgcgatgtctggccgcagcgtt

SEQ ID NO: 13984 - DNA, 25 bp, synthetic construct
  source 1..25: mol_type = other DNA; mol_type = other DNA
gtatgcgatgtctggccgcagcgtt

SEQ ID NO: 13985 - DNA, 25 bp, synthetic construct
  source 1..25: mol_type = other DNA; mol_type = other DNA
gtctacgatgtctggccgcagcgtt

SEQ ID NO: 13986 - DNA, 25 bp, synthetic construct
  source 1..25: mol_type = other DNA; mol_type = other DNA
gtctgagatgtctggccgcagcgtt

SEQ ID NO: 13987 - DNA, 25 bp, synthetic construct
  source 1..25: mol_type = other DNA; mol_type = other DNA
gtctgcaatgtctggccgcagcgtt

SEQ ID NO: 13988 - DNA, 25 bp, synthetic construct
  source 1..25: mol_type = other DNA; mol_type = other DNA
gtctgcgatatctggccgcagcgtt

SEQ ID NO: 13989 - DNA, 25 bp, synthetic construct
  source 1..25: mol_type = other DNA; mol_type = other DNA
gtctgcgatgtatggccgcagcgtt

SEQ ID NO: 13990 - DNA, 25 bp, synthetic construct
  source 1..25: mol_type = other DNA; mol_type = other DNA
gtctgcgatgtctagccgcagcgtt

SEQ ID NO: 13991 - DNA, 25 bp, synthetic construct
  source 1..25: mol_type = other DNA; mol_type = other DNA
gtctgcgatgtctgaccgcagcgtt

SEQ ID NO: 13992 - DNA, 25 bp, synthetic construct
  source 1..25: mol_type = other DNA; mol_type = other DNA
gtctgcgatgtctggacgcagcgtt

SEQ ID NO: 13993 - DNA, 25 bp, synthetic construct
  source 1..25: mol_type = other DNA; mol_type = other DNA
gtctgcgatgtctggcagcagcgtt

SEQ ID NO: 13994 - DNA, 25 bp, synthetic construct
  source 1..25: mol_type = other DNA; mol_type = other DNA
gtctgcgatgtctggccacagcgtt

SEQ ID NO: 13995 - DNA, 25 bp, synthetic construct
  source 1..25: mol_type = other DNA; mol_type = other DNA
gtctgcgatgtctggccgaagcgtt

SEQ ID NO: 13996 - DNA, 25 bp, synthetic construct
  source 1..25: mol_type = other DNA; mol_type = other DNA
gtctgcgatgtctggccgcaacgtt

SEQ ID NO: 13997 - DNA, 25 bp, synthetic construct
  source 1..25: mol_type = other DNA; mol_type = other DNA
gtctgcgatgtctggccgcagagtt

SEQ ID NO: 13998 - DNA, 25 bp, synthetic construct
  source 1..25: mol_type = other DNA; mol_type = other DNA
agtctgcgatgtctggccgcagcgt

SEQ ID NO: 13999 - DNA, 25 bp, synthetic construct
  source 1..25: mol_type = other DNA; mol_type = other DNA
catctgcgatgtctggccgcagcgt

SEQ ID NO: 14000 - DNA, 25 bp, synthetic construct
  source 1..25: mol_type = other DNA; mol_type = other DNA
cgtatgcgatgtctggccgcagcgt

SEQ ID NO: 14001 - DNA, 25 bp, synthetic construct
  source 1..25: mol_type = other DNA; mol_type = other DNA
cgtctacgatgtctggccgcagcgt

SEQ ID NO: 14002 - DNA, 25 bp, synthetic construct
  source 1..25: mol_type = other DNA; mol_type = other DNA
cgtctgagatgtctggccgcagcgt

SEQ ID NO: 14003 - DNA, 25 bp, synthetic construct
  source 1..25: mol_type = other DNA; mol_type = other DNA
cgtctgcaatgtctggccgcagcgt

SEQ ID NO: 14004 - DNA, 25 bp, synthetic construct
  source 1..25: mol_type = other DNA; mol_type = other DNA
cgtctgcgatatctggccgcagcgt

SEQ ID NO: 14005 - DNA, 25 bp, synthetic construct
  source 1..25: mol_type = other DNA; mol_type = other DNA
cgtctgcgatgtatggccgcagcgt

SEQ ID NO: 14006 - DNA, 25 bp, synthetic construct
  source 1..25: mol_type = other DNA; mol_type = other DNA
cgtctgcgatgtctagccgcagcgt

SEQ ID NO: 14007 - DNA, 25 bp, synthetic construct
  source 1..25: mol_type = other DNA; mol_type = other DNA
cgtctgcgatgtctgaccgcagcgt

SEQ ID NO: 14008 - DNA, 25 bp, synthetic construct
  source 1..25: mol_type = other DNA; mol_type = other DNA
cgtctgcgatgtctggacgcagcgt

SEQ ID NO: 14009 - DNA, 25 bp, synthetic construct
  source 1..25: mol_type = other DNA; mol_type = other DNA
cgtctgcgatgtctggcagcagcgt

SEQ ID NO: 14010 - DNA, 25 bp, synthetic construct
  source 1..25: mol_type = other DNA; mol_type = other DNA
cgtctgcgatgtctggccacagcgt

SEQ ID NO: 14011 - DNA, 25 bp, synthetic construct
  source 1..25: mol_type = other DNA; mol_type = other DNA
cgtctgcgatgtctggccgaagcgt

SEQ ID NO: 14012 - DNA, 25 bp, synthetic construct
  source 1..25: mol_type = other DNA; mol_type = other DNA
cgtctgcgatgtctggccgcaacgt

SEQ ID NO: 14013 - DNA, 25 bp, synthetic construct
  source 1..25: mol_type = other DNA; mol_type = other DNA
cgtctgcgatgtctggccgcagagt

SEQ ID NO: 14014 - DNA, 25 bp, synthetic construct
  source 1..25: mol_type = other DNA; mol_type = other DNA
acgtctgcgatgtctggccgcagcg

SEQ ID NO: 14015 - DNA, 25 bp, synthetic construct
  source 1..25: mol_type = other DNA; mol_type = other DNA
gagtctgcgatgtctggccgcagcg

SEQ ID NO: 14016 - DNA, 25 bp, synthetic construct
  source 1..25: mol_type = other DNA; mol_type = other DNA
gcatctgcgatgtctggccgcagcg

SEQ ID NO: 14017 - DNA, 25 bp, synthetic construct
  source 1..25: mol_type = other DNA; mol_type = other DNA
gcgtatgcgatgtctggccgcagcg

SEQ ID NO: 14018 - DNA, 25 bp, synthetic construct
  source 1..25: mol_type = other DNA; mol_type = other DNA
gcgtctacgatgtctggccgcagcg

SEQ ID NO: 14019 - DNA, 25 bp, synthetic construct
  source 1..25: mol_type = other DNA; mol_type = other DNA
gcgtctgagatgtctggccgcagcg

SEQ ID NO: 14020 - DNA, 25 bp, synthetic construct
  source 1..25: mol_type = other DNA; mol_type = other DNA
gcgtctgcaatgtctggccgcagcg

SEQ ID NO: 14021 - DNA, 25 bp, synthetic construct
  source 1..25: mol_type = other DNA; mol_type = other DNA
gcgtctgcgatatctggccgcagcg

SEQ ID NO: 14022 - DNA, 25 bp, synthetic construct
  source 1..25: mol_type = other DNA; mol_type = other DNA
gcgtctgcgatgtatggccgcagcg

SEQ ID NO: 14023 - DNA, 25 bp, synthetic construct
  source 1..25: mol_type = other DNA; mol_type = other DNA
gcgtctgcgatgtctagccgcagcg

SEQ ID NO: 14024 - DNA, 25 bp, synthetic construct
  source 1..25: mol_type = other DNA; mol_type = other DNA
gcgtctgcgatgtctgaccgcagcg

SEQ ID NO: 14025 - DNA, 25 bp, synthetic construct
  source 1..25: mol_type = other DNA; mol_type = other DNA
gcgtctgcgatgtctggacgcagcg

SEQ ID NO: 14026 - DNA, 25 bp, synthetic construct
  source 1..25: mol_type = other DNA; mol_type = other DNA
gcgtctgcgatgtctggcagcagcg

SEQ ID NO: 14027 - DNA, 25 bp, synthetic construct
  source 1..25: mol_type = other DNA; mol_type = other DNA
gcgtctgcgatgtctggccacagcg

SEQ ID NO: 14028 - DNA, 25 bp, synthetic construct
  source 1..25: mol_type = other DNA; mol_type = other DNA
gcgtctgcgatgtctggccgaagcg

SEQ ID NO: 14029 - DNA, 25 bp, synthetic construct
  source 1..25: mol_type = other DNA; mol_type = other DNA
gcgtctgcgatgtctggccgcaacg

SEQ ID NO: 14030 - DNA, 25 bp, synthetic construct
  source 1..25: mol_type = other DNA; mol_type = other DNA
gcgtctgcgatgtctggccgcagag

SEQ ID NO: 14031 - DNA, 25 bp, synthetic construct
  source 1..25: mol_type = other DNA; mol_type = other DNA
tacgtctgcgatgtctggccgcagc

SEQ ID NO: 14032 - DNA, 25 bp, synthetic construct
  source 1..25: mol_type = other DNA; mol_type = other DNA
tgagtctgcgatgtctggccgcagc

SEQ ID NO: 14033 - DNA, 25 bp, synthetic construct
  source 1..25: mol_type = other DNA; mol_type = other DNA
tgcatctgcgatgtctggccgcagc

SEQ ID NO: 14034 - DNA, 25 bp, synthetic construct
  source 1..25: mol_type = other DNA; mol_type = other DNA
tgcgtatgcgatgtctggccgcagc

SEQ ID NO: 14035 - DNA, 25 bp, synthetic construct
  source 1..25: mol_type = other DNA; mol_type = other DNA
tgcgtctacgatgtctggccgcagc

SEQ ID NO: 14036 - DNA, 25 bp, synthetic construct
  source 1..25: mol_type = other DNA; mol_type = other DNA
tgcgtctgagatgtctggccgcagc

SEQ ID NO: 14037 - DNA, 25 bp, synthetic construct
  source 1..25: mol_type = other DNA; mol_type = other DNA
tgcgtctgcaatgtctggccgcagc

SEQ ID NO: 14038 - DNA, 25 bp, synthetic construct
  source 1..25: mol_type = other DNA; mol_type = other DNA
tgcgtctgcgatatctggccgcagc

SEQ ID NO: 14039 - DNA, 25 bp, synthetic construct
  source 1..25: mol_type = other DNA; mol_type = other DNA
tgcgtctgcgatgtatggccgcagc

SEQ ID NO: 14040 - DNA, 25 bp, synthetic construct
  source 1..25: mol_type = other DNA; mol_type = other DNA
tgcgtctgcgatgtctagccgcagc

SEQ ID NO: 14041 - DNA, 25 bp, synthetic construct
  source 1..25: mol_type = other DNA; mol_type = other DNA
tgcgtctgcgatgtctgaccgcagc

SEQ ID NO: 14042 - DNA, 25 bp, synthetic construct
  source 1..25: mol_type = other DNA; mol_type = other DNA
tgcgtctgcgatgtctggacgcagc

SEQ ID NO: 14043 - DNA, 25 bp, synthetic construct
  source 1..25: mol_type = other DNA; mol_type = other DNA
tgcgtctgcgatgtctggcagcagc

SEQ ID NO: 14044 - DNA, 25 bp, synthetic construct
  source 1..25: mol_type = other DNA; mol_type = other DNA
tgcgtctgcgatgtctggccacagc

SEQ ID NO: 14045 - DNA, 25 bp, synthetic construct
  source 1..25: mol_type = other DNA; mol_type = other DNA
tgcgtctgcgatgtctggccgaagc

SEQ ID NO: 14046 - DNA, 25 bp, synthetic construct
  source 1..25: mol_type = other DNA; mol_type = other DNA
tgcgtctgcgatgtctggccgcaga

SEQ ID NO: 14047 - DNA, 25 bp, synthetic construct
  source 1..25: mol_type = other DNA; mol_type = other DNA
atgcgtctgcgatgtctggccgcag

SEQ ID NO: 14048 - DNA, 25 bp, synthetic construct
  source 1..25: mol_type = other DNA; mol_type = other DNA
ctacgtctgcgatgtctggccgcag

SEQ ID NO: 14049 - DNA, 25 bp, synthetic construct
  source 1..25: mol_type = other DNA; mol_type = other DNA
ctgagtctgcgatgtctggccgcag

SEQ ID NO: 14050 - DNA, 25 bp, synthetic construct
  source 1..25: mol_type = other DNA; mol_type = other DNA
ctgcatctgcgatgtctggccgcag

SEQ ID NO: 14051 - DNA, 25 bp, synthetic construct
  source 1..25: mol_type = other DNA; mol_type = other DNA
ctgcgtatgcgatgtctggccgcag

SEQ ID NO: 14052 - DNA, 25 bp, synthetic construct
  source 1..25: mol_type = other DNA; mol_type = other DNA
ctgcgtctacgatgtctggccgcag

SEQ ID NO: 14053 - DNA, 25 bp, synthetic construct
  source 1..25: mol_type = other DNA; mol_type = other DNA
ctgcgtctgagatgtctggccgcag

SEQ ID NO: 14054 - DNA, 25 bp, synthetic construct
  source 1..25: mol_type = other DNA; mol_type = other DNA
ctgcgtctgcaatgtctggccgcag

SEQ ID NO: 14055 - DNA, 25 bp, synthetic construct
  source 1..25: mol_type = other DNA; mol_type = other DNA
ctgcgtctgcgatatctggccgcag

SEQ ID NO: 14056 - DNA, 25 bp, synthetic construct
  source 1..25: mol_type = other DNA; mol_type = other DNA
ctgcgtctgcgatgtatggccgcag

SEQ ID NO: 14057 - DNA, 25 bp, synthetic construct
  source 1..25: mol_type = other DNA; mol_type = other DNA
ctgcgtctgcgatgtctagccgcag

SEQ ID NO: 14058 - DNA, 25 bp, synthetic construct
  source 1..25: mol_type = other DNA; mol_type = other DNA
ctgcgtctgcgatgtctgaccgcag

SEQ ID NO: 14059 - DNA, 25 bp, synthetic construct
  source 1..25: mol_type = other DNA; mol_type = other DNA
ctgcgtctgcgatgtctggacgcag

SEQ ID NO: 14060 - DNA, 25 bp, synthetic construct
  source 1..25: mol_type = other DNA; mol_type = other DNA
ctgcgtctgcgatgtctggcagcag

SEQ ID NO: 14061 - DNA, 25 bp, synthetic construct
  source 1..25: mol_type = other DNA; mol_type = other DNA
ctgcgtctgcgatgtctggccacag

SEQ ID NO: 14062 - DNA, 25 bp, synthetic construct
  source 1..25: mol_type = other DNA; mol_type = other DNA
ctgcgtctgcgatgtctggccgaag

SEQ ID NO: 14063 - DNA, 25 bp, synthetic construct
  source 1..25: mol_type = other DNA; mol_type = other DNA
tatgcgtctgcgatgtctggccgca

SEQ ID NO: 14064 - DNA, 25 bp, synthetic construct
  source 1..25: mol_type = other DNA; mol_type = other DNA
tctacgtctgcgatgtctggccgca

SEQ ID NO: 14065 - DNA, 25 bp, synthetic construct
  source 1..25: mol_type = other DNA; mol_type = other DNA
tctgagtctgcgatgtctggccgca

SEQ ID NO: 14066 - DNA, 25 bp, synthetic construct
  source 1..25: mol_type = other DNA; mol_type = other DNA
tctgcatctgcgatgtctggccgca

SEQ ID NO: 14067 - DNA, 25 bp, synthetic construct
  source 1..25: mol_type = other DNA; mol_type = other DNA
tctgcgtatgcgatgtctggccgca

SEQ ID NO: 14068 - DNA, 25 bp, synthetic construct
  source 1..25: mol_type = other DNA; mol_type = other DNA
tctgcgtctacgatgtctggccgca

SEQ ID NO: 14069 - DNA, 25 bp, synthetic construct
  source 1..25: mol_type = other DNA; mol_type = other DNA
tctgcgtctgagatgtctggccgca

SEQ ID NO: 14070 - DNA, 25 bp, synthetic construct
  source 1..25: mol_type = other DNA; mol_type = other DNA
tctgcgtctgcaatgtctggccgca

SEQ ID NO: 14071 - DNA, 25 bp, synthetic construct
  source 1..25: mol_type = other DNA; mol_type = other DNA
tctgcgtctgcgatatctggccgca

SEQ ID NO: 14072 - DNA, 25 bp, synthetic construct
  source 1..25: mol_type = other DNA; mol_type = other DNA
tctgcgtctgcgatgtatggccgca

SEQ ID NO: 14073 - DNA, 25 bp, synthetic construct
  source 1..25: mol_type = other DNA; mol_type = other DNA
tctgcgtctgcgatgtctagccgca

SEQ ID NO: 14074 - DNA, 25 bp, synthetic construct
  source 1..25: mol_type = other DNA; mol_type = other DNA
tctgcgtctgcgatgtctgaccgca

SEQ ID NO: 14075 - DNA, 25 bp, synthetic construct
  source 1..25: mol_type = other DNA; mol_type = other DNA
tctgcgtctgcgatgtctggacgca

SEQ ID NO: 14076 - DNA, 25 bp, synthetic construct
  source 1..25: mol_type = other DNA; mol_type = other DNA
tctgcgtctgcgatgtctggcagca

SEQ ID NO: 14077 - DNA, 25 bp, synthetic construct
  source 1..25: mol_type = other DNA; mol_type = other DNA
tctgcgtctgcgatgtctggccgaa

SEQ ID NO: 14078 - DNA, 25 bp, synthetic construct
  source 1..25: mol_type = other DNA; mol_type = other DNA
atctgcgtctgcgatgtctggccgc

SEQ ID NO: 14079 - DNA, 25 bp, synthetic construct
  source 1..25: mol_type = other DNA; mol_type = other DNA
gtatgcgtctgcgatgtctggccgc

SEQ ID NO: 14080 - DNA, 25 bp, synthetic construct
  source 1..25: mol_type = other DNA; mol_type = other DNA
gtctacgtctgcgatgtctggccgc

SEQ ID NO: 14081 - DNA, 25 bp, synthetic construct
  source 1..25: mol_type = other DNA; mol_type = other DNA
gtctgagtctgcgatgtctggccgc

SEQ ID NO: 14082 - DNA, 25 bp, synthetic construct
  source 1..25: mol_type = other DNA; mol_type = other DNA
gtctgcatctgcgatgtctggccgc

SEQ ID NO: 14083 - DNA, 25 bp, synthetic construct
  source 1..25: mol_type = other DNA; mol_type = other DNA
gtctgcgtatgcgatgtctggccgc

SEQ ID NO: 14084 - DNA, 25 bp, synthetic construct
  source 1..25: mol_type = other DNA; mol_type = other DNA
gtctgcgtctacgatgtctggccgc

SEQ ID NO: 14085 - DNA, 25 bp, synthetic construct
  source 1..25: mol_type = other DNA; mol_type = other DNA
gtctgcgtctgagatgtctggccgc

SEQ ID NO: 14086 - DNA, 25 bp, synthetic construct
  source 1..25: mol_type = other DNA; mol_type = other DNA
gtctgcgtctgcaatgtctggccgc

SEQ ID NO: 14087 - DNA, 25 bp, synthetic construct
  source 1..25: mol_type = other DNA; mol_type = other DNA
gtctgcgtctgcgatatctggccgc

SEQ ID NO: 14088 - DNA, 25 bp, synthetic construct
  source 1..25: mol_type = other DNA; mol_type = other DNA
gtctgcgtctgcgatgtatggccgc

SEQ ID NO: 14089 - DNA, 25 bp, synthetic construct
  source 1..25: mol_type = other DNA; mol_type = other DNA
gtctgcgtctgcgatgtctagccgc

SEQ ID NO: 14090 - DNA, 25 bp, synthetic construct
  source 1..25: mol_type = other DNA; mol_type = other DNA
gtctgcgtctgcgatgtctgaccgc

SEQ ID NO: 14091 - DNA, 25 bp, synthetic construct
  source 1..25: mol_type = other DNA; mol_type = other DNA
gtctgcgtctgcgatgtctggacgc

SEQ ID NO: 14092 - DNA, 25 bp, synthetic construct
  source 1..25: mol_type = other DNA; mol_type = other DNA
gtctgcgtctgcgatgtctggcagc

SEQ ID NO: 14093 - DNA, 25 bp, synthetic construct
  source 1..25: mol_type = other DNA; mol_type = other DNA
gtctgcgtctgcgatgtctggccga

SEQ ID NO: 14094 - DNA, 25 bp, synthetic construct
  source 1..25: mol_type = other DNA; mol_type = other DNA
aatctgcgtctgcgatgtctggccg

SEQ ID NO: 14095 - DNA, 25 bp, synthetic construct
  source 1..25: mol_type = other DNA; mol_type = other DNA
agtatgcgtctgcgatgtctggccg

SEQ ID NO: 14096 - DNA, 25 bp, synthetic construct
  source 1..25: mol_type = other DNA; mol_type = other DNA
agtctacgtctgcgatgtctggccg

SEQ ID NO: 14097 - DNA, 25 bp, synthetic construct
  source 1..25: mol_type = other DNA; mol_type = other DNA
agtctgagtctgcgatgtctggccg

SEQ ID NO: 14098 - DNA, 25 bp, synthetic construct
  source 1..25: mol_type = other DNA; mol_type = other DNA
agtctgcatctgcgatgtctggccg

SEQ ID NO: 14099 - DNA, 25 bp, synthetic construct
  source 1..25: mol_type = other DNA; mol_type = other DNA
agtctgcgtatgcgatgtctggccg

SEQ ID NO: 14100 - DNA, 25 bp, synthetic construct
  source 1..25: mol_type = other DNA; mol_type = other DNA
agtctgcgtctacgatgtctggccg

SEQ ID NO: 14101 - DNA, 25 bp, synthetic construct
  source 1..25: mol_type = other DNA; mol_type = other DNA
agtctgcgtctgagatgtctggccg

SEQ ID NO: 14102 - DNA, 25 bp, synthetic construct
  source 1..25: mol_type = other DNA; mol_type = other DNA
agtctgcgtctgcaatgtctggccg

SEQ ID NO: 14103 - DNA, 25 bp, synthetic construct
  source 1..25: mol_type = other DNA; mol_type = other DNA
agtctgcgtctgcgatatctggccg

SEQ ID NO: 14104 - DNA, 25 bp, synthetic construct
  source 1..25: mol_type = other DNA; mol_type = other DNA
agtctgcgtctgcgatgtatggccg

SEQ ID NO: 14105 - DNA, 25 bp, synthetic construct
  source 1..25: mol_type = other DNA; mol_type = other DNA
agtctgcgtctgcgatgtctagccg

SEQ ID NO: 14106 - DNA, 25 bp, synthetic construct
  source 1..25: mol_type = other DNA; mol_type = other DNA
agtctgcgtctgcgatgtctgaccg

SEQ ID NO: 14107 - DNA, 25 bp, synthetic construct
  source 1..25: mol_type = other DNA; mol_type = other DNA
agtctgcgtctgcgatgtctggacg

SEQ ID NO: 14108 - DNA, 25 bp, synthetic construct
  source 1..25: mol_type = other DNA; mol_type = other DNA
agtctgcgtctgcgatgtctggcag

SEQ ID NO: 14109 - DNA, 25 bp, synthetic construct
  source 1..25: mol_type = other DNA; mol_type = other DNA
aagtctgcgtctgcgatgtctggcc

SEQ ID NO: 14110 - DNA, 25 bp, synthetic construct
  source 1..25: mol_type = other DNA; mol_type = other DNA
gaatctgcgtctgcgatgtctggcc

SEQ ID NO: 14111 - DNA, 25 bp, synthetic construct
  source 1..25: mol_type = other DNA; mol_type = other DNA
gagtatgcgtctgcgatgtctggcc

SEQ ID NO: 14112 - DNA, 25 bp, synthetic construct
  source 1..25: mol_type = other DNA; mol_type = other DNA
gagtctacgtctgcgatgtctggcc

SEQ ID NO: 14113 - DNA, 25 bp, synthetic construct
  source 1..25: mol_type = other DNA; mol_type = other DNA
gagtctgagtctgcgatgtctggcc

SEQ ID NO: 14114 - DNA, 25 bp, synthetic construct
  source 1..25: mol_type = other DNA; mol_type = other DNA
gagtctgcatctgcgatgtctggcc

SEQ ID NO: 14115 - DNA, 25 bp, synthetic construct
  source 1..25: mol_type = other DNA; mol_type = other DNA
gagtctgcgtatgcgatgtctggcc

SEQ ID NO: 14116 - DNA, 25 bp, synthetic construct
  source 1..25: mol_type = other DNA; mol_type = other DNA
gagtctgcgtctacgatgtctggcc

SEQ ID NO: 14117 - DNA, 25 bp, synthetic construct
  source 1..25: mol_type = other DNA; mol_type = other DNA
gagtctgcgtctgagatgtctggcc

SEQ ID NO: 14118 - DNA, 25 bp, synthetic construct
  source 1..25: mol_type = other DNA; mol_type = other DNA
gagtctgcgtctgcaatgtctggcc

SEQ ID NO: 14119 - DNA, 25 bp, synthetic construct
  source 1..25: mol_type = other DNA; mol_type = other DNA
gagtctgcgtctgcgatatctggcc

SEQ ID NO: 14120 - DNA, 25 bp, synthetic construct
  source 1..25: mol_type = other DNA; mol_type = other DNA
gagtctgcgtctgcgatgtatggcc

SEQ ID NO: 14121 - DNA, 25 bp, synthetic construct
  source 1..25: mol_type = other DNA; mol_type = other DNA
gagtctgcgtctgcgatgtctagcc

SEQ ID NO: 14122 - DNA, 25 bp, synthetic construct
  source 1..25: mol_type = other DNA; mol_type = other DNA
gagtctgcgtctgcgatgtctggac

SEQ ID NO: 14123 - DNA, 25 bp, synthetic construct
  source 1..25: mol_type = other DNA; mol_type = other DNA
gagtctgcgtctgcgatgtctggca

SEQ ID NO: 14124 - DNA, 25 bp, synthetic construct
  source 1..25: mol_type = other DNA; mol_type = other DNA
agagtctgcgtctgcgatgtctggc

SEQ ID NO: 14125 - DNA, 25 bp, synthetic construct
  source 1..25: mol_type = other DNA; mol_type = other DNA
gaagtctgcgtctgcgatgtctggc

SEQ ID NO: 14126 - DNA, 25 bp, synthetic construct
  source 1..25: mol_type = other DNA; mol_type = other DNA
ggaatctgcgtctgcgatgtctggc

SEQ ID NO: 14127 - DNA, 25 bp, synthetic construct
  source 1..25: mol_type = other DNA; mol_type = other DNA
ggagtatgcgtctgcgatgtctggc

SEQ ID NO: 14128 - DNA, 25 bp, synthetic construct
  source 1..25: mol_type = other DNA; mol_type = other DNA
ggagtctacgtctgcgatgtctggc

SEQ ID NO: 14129 - DNA, 25 bp, synthetic construct
  source 1..25: mol_type = other DNA; mol_type = other DNA
ggagtctgagtctgcgatgtctggc

SEQ ID NO: 14130 - DNA, 25 bp, synthetic construct
  source 1..25: mol_type = other DNA; mol_type = other DNA
ggagtctgcatctgcgatgtctggc

SEQ ID NO: 14131 - DNA, 25 bp, synthetic construct
  source 1..25: mol_type = other DNA; mol_type = other DNA
ggagtctgcgtatgcgatgtctggc

SEQ ID NO: 14132 - DNA, 25 bp, synthetic construct
  source 1..25: mol_type = other DNA; mol_type = other DNA
ggagtctgcgtctacgatgtctggc

SEQ ID NO: 14133 - DNA, 25 bp, synthetic construct
  source 1..25: mol_type = other DNA; mol_type = other DNA
ggagtctgcgtctgagatgtctggc

SEQ ID NO: 14134 - DNA, 25 bp, synthetic construct
  source 1..25: mol_type = other DNA; mol_type = other DNA
ggagtctgcgtctgcaatgtctggc

SEQ ID NO: 14135 - DNA, 25 bp, synthetic construct
  source 1..25: mol_type = other DNA; mol_type = other DNA
ggagtctgcgtctgcgatatctggc

SEQ ID NO: 14136 - DNA, 25 bp, synthetic construct
  source 1..25: mol_type = other DNA; mol_type = other DNA
ggagtctgcgtctgcgatgtatggc

SEQ ID NO: 14137 - DNA, 25 bp, synthetic construct
  source 1..25: mol_type = other DNA; mol_type = other DNA
ggagtctgcgtctgcgatgtctagc

SEQ ID NO: 14138 - DNA, 25 bp, synthetic construct
  source 1..25: mol_type = other DNA; mol_type = other DNA
ggagtctgcgtctgcgatgtctgga

SEQ ID NO: 14139 - DNA, 25 bp, synthetic construct
  source 1..25: mol_type = other DNA; mol_type = other DNA
tagagtctgcgtctgcgatgtctgg

SEQ ID NO: 14140 - DNA, 25 bp, synthetic construct
  source 1..25: mol_type = other DNA; mol_type = other DNA
tgaagtctgcgtctgcgatgtctgg

SEQ ID NO: 14141 - DNA, 25 bp, synthetic construct
  source 1..25: mol_type = other DNA; mol_type = other DNA
tggaatctgcgtctgcgatgtctgg

SEQ ID NO: 14142 - DNA, 25 bp, synthetic construct
  source 1..25: mol_type = other DNA; mol_type = other DNA
tggagtatgcgtctgcgatgtctgg

SEQ ID NO: 14143 - DNA, 25 bp, synthetic construct
  source 1..25: mol_type = other DNA; mol_type = other DNA
tggagtctacgtctgcgatgtctgg

SEQ ID NO: 14144 - DNA, 25 bp, synthetic construct
  source 1..25: mol_type = other DNA; mol_type = other DNA
tggagtctgagtctgcgatgtctgg

SEQ ID NO: 14145 - DNA, 25 bp, synthetic construct
  source 1..25: mol_type = other DNA; mol_type = other DNA
tggagtctgcatctgcgatgtctgg

SEQ ID NO: 14146 - DNA, 25 bp, synthetic construct
  source 1..25: mol_type = other DNA; mol_type = other DNA
tggagtctgcgtatgcgatgtctgg

SEQ ID NO: 14147 - DNA, 25 bp, synthetic construct
  source 1..25: mol_type = other DNA; mol_type = other DNA
tggagtctgcgtctacgatgtctgg

SEQ ID NO: 14148 - DNA, 25 bp, synthetic construct
  source 1..25: mol_type = other DNA; mol_type = other DNA
tggagtctgcgtctgagatgtctgg

SEQ ID NO: 14149 - DNA, 25 bp, synthetic construct
  source 1..25: mol_type = other DNA; mol_type = other DNA
tggagtctgcgtctgcaatgtctgg

SEQ ID NO: 14150 - DNA, 25 bp, synthetic construct
  source 1..25: mol_type = other DNA; mol_type = other DNA
tggagtctgcgtctgcgatatctgg

SEQ ID NO: 14151 - DNA, 25 bp, synthetic construct
  source 1..25: mol_type = other DNA; mol_type = other DNA
tggagtctgcgtctgcgatgtatgg

SEQ ID NO: 14152 - DNA, 25 bp, synthetic construct
  source 1..25: mol_type = other DNA; mol_type = other DNA
tggagtctgcgtctgcgatgtctag

SEQ ID NO: 14153 - DNA, 25 bp, synthetic construct
  source 1..25: mol_type = other DNA; mol_type = other DNA
atggagtctgcgtctgcgatgtctg

SEQ ID NO: 14154 - DNA, 25 bp, synthetic construct
  source 1..25: mol_type = other DNA; mol_type = other DNA
ctagagtctgcgtctgcgatgtctg

SEQ ID NO: 14155 - DNA, 25 bp, synthetic construct
  source 1..25: mol_type = other DNA; mol_type = other DNA
ctgaagtctgcgtctgcgatgtctg

SEQ ID NO: 14156 - DNA, 25 bp, synthetic construct
  source 1..25: mol_type = other DNA; mol_type = other DNA
ctggaatctgcgtctgcgatgtctg

SEQ ID NO: 14157 - DNA, 25 bp, synthetic construct
  source 1..25: mol_type = other DNA; mol_type = other DNA
ctggagtatgcgtctgcgatgtctg

SEQ ID NO: 14158 - DNA, 25 bp, synthetic construct
  source 1..25: mol_type = other DNA; mol_type = other DNA
ctggagtctacgtctgcgatgtctg

SEQ ID NO: 14159 - DNA, 25 bp, synthetic construct
  source 1..25: mol_type = other DNA; mol_type = other DNA
ctggagtctgagtctgcgatgtctg

SEQ ID NO: 14160 - DNA, 25 bp, synthetic construct
  source 1..25: mol_type = other DNA; mol_type = other DNA
ctggagtctgcatctgcgatgtctg

SEQ ID NO: 14161 - DNA, 25 bp, synthetic construct
  source 1..25: mol_type = other DNA; mol_type = other DNA
ctggagtctgcgtatgcgatgtctg

SEQ ID NO: 14162 - DNA, 25 bp, synthetic construct
  source 1..25: mol_type = other DNA; mol_type = other DNA
ctggagtctgcgtctacgatgtctg

SEQ ID NO: 14163 - DNA, 25 bp, synthetic construct
  source 1..25: mol_type = other DNA; mol_type = other DNA
ctggagtctgcgtctgagatgtctg

SEQ ID NO: 14164 - DNA, 25 bp, synthetic construct
  source 1..25: mol_type = other DNA; mol_type = other DNA
ctggagtctgcgtctgcaatgtctg

SEQ ID NO: 14165 - DNA, 25 bp, synthetic construct
  source 1..25: mol_type = other DNA; mol_type = other DNA
ctggagtctgcgtctgcgatatctg

SEQ ID NO: 14166 - DNA, 25 bp, synthetic construct
  source 1..25: mol_type = other DNA; mol_type = other DNA
ctggagtctgcgtctgcgatgtatg

SEQ ID NO: 14167 - DNA, 25 bp, synthetic construct
  source 1..25: mol_type = other DNA; mol_type = other DNA
tatggagtctgcgtctgcgatgtct

SEQ ID NO: 14168 - DNA, 25 bp, synthetic construct
  source 1..25: mol_type = other DNA; mol_type = other DNA
tctagagtctgcgtctgcgatgtct

SEQ ID NO: 14169 - DNA, 25 bp, synthetic construct
  source 1..25: mol_type = other DNA; mol_type = other DNA
tctgaagtctgcgtctgcgatgtct

SEQ ID NO: 14170 - DNA, 25 bp, synthetic construct
  source 1..25: mol_type = other DNA; mol_type = other DNA
tctggaatctgcgtctgcgatgtct

SEQ ID NO: 14171 - DNA, 25 bp, synthetic construct
  source 1..25: mol_type = other DNA; mol_type = other DNA
tctggagtatgcgtctgcgatgtct

SEQ ID NO: 14172 - DNA, 25 bp, synthetic construct
  source 1..25: mol_type = other DNA; mol_type = other DNA
tctggagtctacgtctgcgatgtct

SEQ ID NO: 14173 - DNA, 25 bp, synthetic construct
  source 1..25: mol_type = other DNA; mol_type = other DNA
tctggagtctgagtctgcgatgtct

SEQ ID NO: 14174 - DNA, 25 bp, synthetic construct
  source 1..25: mol_type = other DNA; mol_type = other DNA
tctggagtctgcatctgcgatgtct

SEQ ID NO: 14175 - DNA, 25 bp, synthetic construct
  source 1..25: mol_type = other DNA; mol_type = other DNA
tctggagtctgcgtatgcgatgtct

SEQ ID NO: 14176 - DNA, 25 bp, synthetic construct
  source 1..25: mol_type = other DNA; mol_type = other DNA
tctggagtctgcgtctacgatgtct

SEQ ID NO: 14177 - DNA, 25 bp, synthetic construct
  source 1..25: mol_type = other DNA; mol_type = other DNA
tctggagtctgcgtctgagatgtct

SEQ ID NO: 14178 - DNA, 25 bp, synthetic construct
  source 1..25: mol_type = other DNA; mol_type = other DNA
tctggagtctgcgtctgcaatgtct

SEQ ID NO: 14179 - DNA, 25 bp, synthetic construct
  source 1..25: mol_type = other DNA; mol_type = other DNA
tctggagtctgcgtctgcgatgtat

SEQ ID NO: 14180 - DNA, 25 bp, synthetic construct
  source 1..25: mol_type = other DNA; mol_type = other DNA
atctggagtctgcgtctgcgatgtc

SEQ ID NO: 14181 - DNA, 25 bp, synthetic construct
  source 1..25: mol_type = other DNA; mol_type = other DNA
ctatggagtctgcgtctgcgatgtc

SEQ ID NO: 14182 - DNA, 25 bp, synthetic construct
  source 1..25: mol_type = other DNA; mol_type = other DNA
ctctagagtctgcgtctgcgatgtc

SEQ ID NO: 14183 - DNA, 25 bp, synthetic construct
  source 1..25: mol_type = other DNA; mol_type = other DNA
ctctgaagtctgcgtctgcgatgtc

SEQ ID NO: 14184 - DNA, 25 bp, synthetic construct
  source 1..25: mol_type = other DNA; mol_type = other DNA
ctctggaatctgcgtctgcgatgtc

SEQ ID NO: 14185 - DNA, 25 bp, synthetic construct
  source 1..25: mol_type = other DNA; mol_type = other DNA
ctctggagtatgcgtctgcgatgtc

SEQ ID NO: 14186 - DNA, 25 bp, synthetic construct
  source 1..25: mol_type = other DNA; mol_type = other DNA
ctctggagtctacgtctgcgatgtc

SEQ ID NO: 14187 - DNA, 25 bp, synthetic construct
  source 1..25: mol_type = other DNA; mol_type = other DNA
ctctggagtctgagtctgcgatgtc

SEQ ID NO: 14188 - DNA, 25 bp, synthetic construct
  source 1..25: mol_type = other DNA; mol_type = other DNA
ctctggagtctgcatctgcgatgtc

SEQ ID NO: 14189 - DNA, 25 bp, synthetic construct
  source 1..25: mol_type = other DNA; mol_type = other DNA
ctctggagtctgcgtatgcgatgtc

SEQ ID NO: 14190 - DNA, 25 bp, synthetic construct
  source 1..25: mol_type = other DNA; mol_type = other DNA
ctctggagtctgcgtctacgatgtc

SEQ ID NO: 14191 - DNA, 25 bp, synthetic construct
  source 1..25: mol_type = other DNA; mol_type = other DNA
ctctggagtctgcgtctgagatgtc

SEQ ID NO: 14192 - DNA, 25 bp, synthetic construct
  source 1..25: mol_type = other DNA; mol_type = other DNA
ctctggagtctgcgtctgcaatgtc

SEQ ID NO: 14193 - DNA, 25 bp, synthetic construct
  source 1..25: mol_type = other DNA; mol_type = other DNA
ctctggagtctgcgtctgcgatgta

SEQ ID NO: 14194 - DNA, 25 bp, synthetic construct
  source 1..25: mol_type = other DNA; mol_type = other DNA
actctggagtctgcgtctgcgatgt

SEQ ID NO: 14195 - DNA, 25 bp, synthetic construct
  source 1..25: mol_type = other DNA; mol_type = other DNA
gatctggagtctgcgtctgcgatgt

SEQ ID NO: 14196 - DNA, 25 bp, synthetic construct
  source 1..25: mol_type = other DNA; mol_type = other DNA
gctatggagtctgcgtctgcgatgt

SEQ ID NO: 14197 - DNA, 25 bp, synthetic construct
  source 1..25: mol_type = other DNA; mol_type = other DNA
gctctagagtctgcgtctgcgatgt

SEQ ID NO: 14198 - DNA, 25 bp, synthetic construct
  source 1..25: mol_type = other DNA; mol_type = other DNA
gctctgaagtctgcgtctgcgatgt

SEQ ID NO: 14199 - DNA, 25 bp, synthetic construct
  source 1..25: mol_type = other DNA; mol_type = other DNA
gctctggaatctgcgtctgcgatgt

SEQ ID NO: 14200 - DNA, 25 bp, synthetic construct
  source 1..25: mol_type = other DNA; mol_type = other DNA
gctctggagtatgcgtctgcgatgt

SEQ ID NO: 14201 - DNA, 25 bp, synthetic construct
  source 1..25: mol_type = other DNA; mol_type = other DNA
gctctggagtctacgtctgcgatgt

SEQ ID NO: 14202 - DNA, 25 bp, synthetic construct
  source 1..25: mol_type = other DNA; mol_type = other DNA
gctctggagtctgagtctgcgatgt

SEQ ID NO: 14203 - DNA, 25 bp, synthetic construct
  source 1..25: mol_type = other DNA; mol_type = other DNA
gctctggagtctgcatctgcgatgt

SEQ ID NO: 14204 - DNA, 25 bp, synthetic construct
  source 1..25: mol_type = other DNA; mol_type = other DNA
gctctggagtctgcgtatgcgatgt

SEQ ID NO: 14205 - DNA, 25 bp, synthetic construct
  source 1..25: mol_type = other DNA; mol_type = other DNA
gctctggagtctgcgtctacgatgt

SEQ ID NO: 14206 - DNA, 25 bp, synthetic construct
  source 1..25: mol_type = other DNA; mol_type = other DNA
gctctggagtctgcgtctgagatgt

SEQ ID NO: 14207 - DNA, 25 bp, synthetic construct
  source 1..25: mol_type = other DNA; mol_type = other DNA
gctctggagtctgcgtctgcaatgt

SEQ ID NO: 14208 - DNA, 25 bp, synthetic construct
  source 1..25: mol_type = other DNA; mol_type = other DNA
agctctggagtctgcgtctgcgatg

SEQ ID NO: 14209 - DNA, 25 bp, synthetic construct
  source 1..25: mol_type = other DNA; mol_type = other DNA
gactctggagtctgcgtctgcgatg

SEQ ID NO: 14210 - DNA, 25 bp, synthetic construct
  source 1..25: mol_type = other DNA; mol_type = other DNA
ggatctggagtctgcgtctgcgatg

SEQ ID NO: 14211 - DNA, 25 bp, synthetic construct
  source 1..25: mol_type = other DNA; mol_type = other DNA
ggctatggagtctgcgtctgcgatg

SEQ ID NO: 14212 - DNA, 25 bp, synthetic construct
  source 1..25: mol_type = other DNA; mol_type = other DNA
ggctctagagtctgcgtctgcgatg

SEQ ID NO: 14213 - DNA, 25 bp, synthetic construct
  source 1..25: mol_type = other DNA; mol_type = other DNA
ggctctgaagtctgcgtctgcgatg

SEQ ID NO: 14214 - DNA, 25 bp, synthetic construct
  source 1..25: mol_type = other DNA; mol_type = other DNA
ggctctggaatctgcgtctgcgatg

SEQ ID NO: 14215 - DNA, 25 bp, synthetic construct
  source 1..25: mol_type = other DNA; mol_type = other DNA
ggctctggagtatgcgtctgcgatg

SEQ ID NO: 14216 - DNA, 25 bp, synthetic construct
  source 1..25: mol_type = other DNA; mol_type = other DNA
ggctctggagtctacgtctgcgatg

SEQ ID NO: 14217 - DNA, 25 bp, synthetic construct
  source 1..25: mol_type = other DNA; mol_type = other DNA
ggctctggagtctgagtctgcgatg

SEQ ID NO: 14218 - DNA, 25 bp, synthetic construct
  source 1..25: mol_type = other DNA; mol_type = other DNA
ggctctggagtctgcatctgcgatg

SEQ ID NO: 14219 - DNA, 25 bp, synthetic construct
  source 1..25: mol_type = other DNA; mol_type = other DNA
ggctctggagtctgcgtatgcgatg

SEQ ID NO: 14220 - DNA, 25 bp, synthetic construct
  source 1..25: mol_type = other DNA; mol_type = other DNA
ggctctggagtctgcgtctacgatg

SEQ ID NO: 14221 - DNA, 25 bp, synthetic construct
  source 1..25: mol_type = other DNA; mol_type = other DNA
ggctctggagtctgcgtctgagatg

SEQ ID NO: 14222 - DNA, 25 bp, synthetic construct
  source 1..25: mol_type = other DNA; mol_type = other DNA
ggctctggagtctgcgtctgcaatg

SEQ ID NO: 14223 - DNA, 25 bp, synthetic construct
  source 1..25: mol_type = other DNA; mol_type = other DNA
aggctctggagtctgcgtctgcgat

SEQ ID NO: 14224 - DNA, 25 bp, synthetic construct
  source 1..25: mol_type = other DNA; mol_type = other DNA
cagctctggagtctgcgtctgcgat

SEQ ID NO: 14225 - DNA, 25 bp, synthetic construct
  source 1..25: mol_type = other DNA; mol_type = other DNA
cgactctggagtctgcgtctgcgat

SEQ ID NO: 14226 - DNA, 25 bp, synthetic construct
  source 1..25: mol_type = other DNA; mol_type = other DNA
cggatctggagtctgcgtctgcgat

SEQ ID NO: 14227 - DNA, 25 bp, synthetic construct
  source 1..25: mol_type = other DNA; mol_type = other DNA
cggctatggagtctgcgtctgcgat

SEQ ID NO: 14228 - DNA, 25 bp, synthetic construct
  source 1..25: mol_type = other DNA; mol_type = other DNA
cggctctagagtctgcgtctgcgat

SEQ ID NO: 14229 - DNA, 25 bp, synthetic construct
  source 1..25: mol_type = other DNA; mol_type = other DNA
cggctctgaagtctgcgtctgcgat

SEQ ID NO: 14230 - DNA, 25 bp, synthetic construct
  source 1..25: mol_type = other DNA; mol_type = other DNA
cggctctggaatctgcgtctgcgat

SEQ ID NO: 14231 - DNA, 25 bp, synthetic construct
  source 1..25: mol_type = other DNA; mol_type = other DNA
cggctctggagtatgcgtctgcgat

SEQ ID NO: 14232 - DNA, 25 bp, synthetic construct
  source 1..25: mol_type = other DNA; mol_type = other DNA
cggctctggagtctacgtctgcgat

SEQ ID NO: 14233 - DNA, 25 bp, synthetic construct
  source 1..25: mol_type = other DNA; mol_type = other DNA
cggctctggagtctgagtctgcgat

SEQ ID NO: 14234 - DNA, 25 bp, synthetic construct
  source 1..25: mol_type = other DNA; mol_type = other DNA
cggctctggagtctgcatctgcgat

SEQ ID NO: 14235 - DNA, 25 bp, synthetic construct
  source 1..25: mol_type = other DNA; mol_type = other DNA
cggctctggagtctgcgtatgcgat

SEQ ID NO: 14236 - DNA, 25 bp, synthetic construct
  source 1..25: mol_type = other DNA; mol_type = other DNA
cggctctggagtctgcgtctacgat

SEQ ID NO: 14237 - DNA, 25 bp, synthetic construct
  source 1..25: mol_type = other DNA; mol_type = other DNA
cggctctggagtctgcgtctgagat

SEQ ID NO: 14238 - DNA, 18 bp, synthetic construct
  source 1..18: mol_type = other DNA; mol_type = other DNA
acctgggccacctcctgc

SEQ ID NO: 14239 - DNA, 18 bp, synthetic construct
  source 1..18: mol_type = other DNA; mol_type = other DNA
gactgggccacctcctgc

SEQ ID NO: 14240 - DNA, 18 bp, synthetic construct
  source 1..18: mol_type = other DNA; mol_type = other DNA
gcatgggccacctcctgc

SEQ ID NO: 14241 - DNA, 18 bp, synthetic construct
  source 1..18: mol_type = other DNA; mol_type = other DNA
gcctaggccacctcctgc

SEQ ID NO: 14242 - DNA, 18 bp, synthetic construct
  source 1..18: mol_type = other DNA; mol_type = other DNA
gcctgagccacctcctgc

SEQ ID NO: 14243 - DNA, 18 bp, synthetic construct
  source 1..18: mol_type = other DNA; mol_type = other DNA
gcctggaccacctcctgc

SEQ ID NO: 14244 - DNA, 18 bp, synthetic construct
  source 1..18: mol_type = other DNA; mol_type = other DNA
gcctgggacacctcctgc

SEQ ID NO: 14245 - DNA, 18 bp, synthetic construct
  source 1..18: mol_type = other DNA; mol_type = other DNA
gcctgggcaacctcctgc

SEQ ID NO: 14246 - DNA, 18 bp, synthetic construct
  source 1..18: mol_type = other DNA; mol_type = other DNA
gcctgggccaactcctgc

SEQ ID NO: 14247 - DNA, 18 bp, synthetic construct
  source 1..18: mol_type = other DNA; mol_type = other DNA
gcctgggccacatcctgc

SEQ ID NO: 14248 - DNA, 18 bp, synthetic construct
  source 1..18: mol_type = other DNA; mol_type = other DNA
gcctgggccacctactgc

SEQ ID NO: 14249 - DNA, 18 bp, synthetic construct
  source 1..18: mol_type = other DNA; mol_type = other DNA
gcctgggccacctcatgc

SEQ ID NO: 14250 - DNA, 18 bp, synthetic construct
  source 1..18: mol_type = other DNA; mol_type = other DNA
gcctgggccacctcctga

SEQ ID NO: 14251 - DNA, 18 bp, synthetic construct
  source 1..18: mol_type = other DNA; mol_type = other DNA
tacctgggccacctcctg

SEQ ID NO: 14252 - DNA, 18 bp, synthetic construct
  source 1..18: mol_type = other DNA; mol_type = other DNA
tgactgggccacctcctg

SEQ ID NO: 14253 - DNA, 18 bp, synthetic construct
  source 1..18: mol_type = other DNA; mol_type = other DNA
tgcatgggccacctcctg

SEQ ID NO: 14254 - DNA, 18 bp, synthetic construct
  source 1..18: mol_type = other DNA; mol_type = other DNA
tgcctaggccacctcctg

SEQ ID NO: 14255 - DNA, 18 bp, synthetic construct
  source 1..18: mol_type = other DNA; mol_type = other DNA
tgcctgagccacctcctg

SEQ ID NO: 14256 - DNA, 18 bp, synthetic construct
  source 1..18: mol_type = other DNA; mol_type = other DNA
tgcctggaccacctcctg

SEQ ID NO: 14257 - DNA, 18 bp, synthetic construct
  source 1..18: mol_type = other DNA; mol_type = other DNA
tgcctgggacacctcctg

SEQ ID NO: 14258 - DNA, 18 bp, synthetic construct
  source 1..18: mol_type = other DNA; mol_type = other DNA
tgcctgggcaacctcctg

SEQ ID NO: 14259 - DNA, 18 bp, synthetic construct
  source 1..18: mol_type = other DNA; mol_type = other DNA
tgcctgggccaactcctg

SEQ ID NO: 14260 - DNA, 18 bp, synthetic construct
  source 1..18: mol_type = other DNA; mol_type = other DNA
tgcctgggccacatcctg

SEQ ID NO: 14261 - DNA, 18 bp, synthetic construct
  source 1..18: mol_type = other DNA; mol_type = other DNA
tgcctgggccacctactg

SEQ ID NO: 14262 - DNA, 18 bp, synthetic construct
  source 1..18: mol_type = other DNA; mol_type = other DNA
tgcctgggccacctcatg

SEQ ID NO: 14263 - DNA, 18 bp, synthetic construct
  source 1..18: mol_type = other DNA; mol_type = other DNA
atgcctgggccacctcct

SEQ ID NO: 14264 - DNA, 18 bp, synthetic construct
  source 1..18: mol_type = other DNA; mol_type = other DNA
ctacctgggccacctcct

SEQ ID NO: 14265 - DNA, 18 bp, synthetic construct
  source 1..18: mol_type = other DNA; mol_type = other DNA
ctgactgggccacctcct

SEQ ID NO: 14266 - DNA, 18 bp, synthetic construct
  source 1..18: mol_type = other DNA; mol_type = other DNA
ctgcatgggccacctcct

SEQ ID NO: 14267 - DNA, 18 bp, synthetic construct
  source 1..18: mol_type = other DNA; mol_type = other DNA
ctgcctaggccacctcct

SEQ ID NO: 14268 - DNA, 18 bp, synthetic construct
  source 1..18: mol_type = other DNA; mol_type = other DNA
ctgcctgagccacctcct

SEQ ID NO: 14269 - DNA, 18 bp, synthetic construct
  source 1..18: mol_type = other DNA; mol_type = other DNA
ctgcctgggacacctcct

SEQ ID NO: 14270 - DNA, 18 bp, synthetic construct
  source 1..18: mol_type = other DNA; mol_type = other DNA
ctgcctgggcaacctcct

SEQ ID NO: 14271 - DNA, 18 bp, synthetic construct
  source 1..18: mol_type = other DNA; mol_type = other DNA
ctgcctgggccaactcct

SEQ ID NO: 14272 - DNA, 18 bp, synthetic construct
  source 1..18: mol_type = other DNA; mol_type = other DNA
ctgcctgggccacatcct

SEQ ID NO: 14273 - DNA, 18 bp, synthetic construct
  source 1..18: mol_type = other DNA; mol_type = other DNA
ctgcctgggccacctact

SEQ ID NO: 14274 - DNA, 18 bp, synthetic construct
  source 1..18: mol_type = other DNA; mol_type = other DNA
ctgcctgggccacctcat

SEQ ID NO: 14275 - DNA, 18 bp, synthetic construct
  source 1..18: mol_type = other DNA; mol_type = other DNA
actgcctgggccacctcc

SEQ ID NO: 14276 - DNA, 18 bp, synthetic construct
  source 1..18: mol_type = other DNA; mol_type = other DNA
gatgcctgggccacctcc

SEQ ID NO: 14277 - DNA, 18 bp, synthetic construct
  source 1..18: mol_type = other DNA; mol_type = other DNA
gctacctgggccacctcc

SEQ ID NO: 14278 - DNA, 18 bp, synthetic construct
  source 1..18: mol_type = other DNA; mol_type = other DNA
gctgactgggccacctcc

SEQ ID NO: 14279 - DNA, 18 bp, synthetic construct
  source 1..18: mol_type = other DNA; mol_type = other DNA
gctgcatgggccacctcc

SEQ ID NO: 14280 - DNA, 18 bp, synthetic construct
  source 1..18: mol_type = other DNA; mol_type = other DNA
gctgcctaggccacctcc

SEQ ID NO: 14281 - DNA, 18 bp, synthetic construct
  source 1..18: mol_type = other DNA; mol_type = other DNA
gctgcctgagccacctcc

SEQ ID NO: 14282 - DNA, 18 bp, synthetic construct
  source 1..18: mol_type = other DNA; mol_type = other DNA
gctgcctgggacacctcc

SEQ ID NO: 14283 - DNA, 18 bp, synthetic construct
  source 1..18: mol_type = other DNA; mol_type = other DNA
gctgcctgggcaacctcc

SEQ ID NO: 14284 - DNA, 18 bp, synthetic construct
  source 1..18: mol_type = other DNA; mol_type = other DNA
gctgcctgggccaactcc

SEQ ID NO: 14285 - DNA, 18 bp, synthetic construct
  source 1..18: mol_type = other DNA; mol_type = other DNA
gctgcctgggccacatcc

SEQ ID NO: 14286 - DNA, 18 bp, synthetic construct
  source 1..18: mol_type = other DNA; mol_type = other DNA
gctgcctgggccacctac

SEQ ID NO: 14287 - DNA, 18 bp, synthetic construct
  source 1..18: mol_type = other DNA; mol_type = other DNA
gctgcctgggccacctca

SEQ ID NO: 14288 - DNA, 18 bp, synthetic construct
  source 1..18: mol_type = other DNA; mol_type = other DNA
aactgcctgggccacctc

SEQ ID NO: 14289 - DNA, 18 bp, synthetic construct
  source 1..18: mol_type = other DNA; mol_type = other DNA
agatgcctgggccacctc

SEQ ID NO: 14290 - DNA, 18 bp, synthetic construct
  source 1..18: mol_type = other DNA; mol_type = other DNA
agctacctgggccacctc

SEQ ID NO: 14291 - DNA, 18 bp, synthetic construct
  source 1..18: mol_type = other DNA; mol_type = other DNA
agctgactgggccacctc

SEQ ID NO: 14292 - DNA, 18 bp, synthetic construct
  source 1..18: mol_type = other DNA; mol_type = other DNA
agctgcatgggccacctc

SEQ ID NO: 14293 - DNA, 18 bp, synthetic construct
  source 1..18: mol_type = other DNA; mol_type = other DNA
agctgcctaggccacctc

SEQ ID NO: 14294 - DNA, 18 bp, synthetic construct
  source 1..18: mol_type = other DNA; mol_type = other DNA
agctgcctgagccacctc

SEQ ID NO: 14295 - DNA, 18 bp, synthetic construct
  source 1..18: mol_type = other DNA; mol_type = other DNA
agctgcctgggacacctc

SEQ ID NO: 14296 - DNA, 18 bp, synthetic construct
  source 1..18: mol_type = other DNA; mol_type = other DNA
agctgcctgggcaacctc

SEQ ID NO: 14297 - DNA, 18 bp, synthetic construct
  source 1..18: mol_type = other DNA; mol_type = other DNA
agctgcctgggccaactc

SEQ ID NO: 14298 - DNA, 18 bp, synthetic construct
  source 1..18: mol_type = other DNA; mol_type = other DNA
agctgcctgggccacatc

SEQ ID NO: 14299 - DNA, 18 bp, synthetic construct
  source 1..18: mol_type = other DNA; mol_type = other DNA
agctgcctgggccaccta

SEQ ID NO: 14300 - DNA, 18 bp, synthetic construct
  source 1..18: mol_type = other DNA; mol_type = other DNA
aagctgcctgggccacct

SEQ ID NO: 14301 - DNA, 18 bp, synthetic construct
  source 1..18: mol_type = other DNA; mol_type = other DNA
caactgcctgggccacct

SEQ ID NO: 14302 - DNA, 18 bp, synthetic construct
  source 1..18: mol_type = other DNA; mol_type = other DNA
cagatgcctgggccacct

SEQ ID NO: 14303 - DNA, 18 bp, synthetic construct
  source 1..18: mol_type = other DNA; mol_type = other DNA
cagctacctgggccacct

SEQ ID NO: 14304 - DNA, 18 bp, synthetic construct
  source 1..18: mol_type = other DNA; mol_type = other DNA
cagctgactgggccacct

SEQ ID NO: 14305 - DNA, 18 bp, synthetic construct
  source 1..18: mol_type = other DNA; mol_type = other DNA
cagctgcatgggccacct

SEQ ID NO: 14306 - DNA, 18 bp, synthetic construct
  source 1..18: mol_type = other DNA; mol_type = other DNA
cagctgcctaggccacct

SEQ ID NO: 14307 - DNA, 18 bp, synthetic construct
  source 1..18: mol_type = other DNA; mol_type = other DNA
cagctgcctgagccacct

SEQ ID NO: 14308 - DNA, 18 bp, synthetic construct
  source 1..18: mol_type = other DNA; mol_type = other DNA
cagctgcctgggacacct

SEQ ID NO: 14309 - DNA, 18 bp, synthetic construct
  source 1..18: mol_type = other DNA; mol_type = other DNA
cagctgcctgggcaacct

SEQ ID NO: 14310 - DNA, 18 bp, synthetic construct
  source 1..18: mol_type = other DNA; mol_type = other DNA
cagctgcctgggccaact

SEQ ID NO: 14311 - DNA, 18 bp, synthetic construct
  source 1..18: mol_type = other DNA; mol_type = other DNA
cagctgcctgggccacat

SEQ ID NO: 14312 - DNA, 18 bp, synthetic construct
  source 1..18: mol_type = other DNA; mol_type = other DNA
taagctgcctgggccacc

SEQ ID NO: 14313 - DNA, 18 bp, synthetic construct
  source 1..18: mol_type = other DNA; mol_type = other DNA
tcaactgcctgggccacc

SEQ ID NO: 14314 - DNA, 18 bp, synthetic construct
  source 1..18: mol_type = other DNA; mol_type = other DNA
tcagatgcctgggccacc

SEQ ID NO: 14315 - DNA, 18 bp, synthetic construct
  source 1..18: mol_type = other DNA; mol_type = other DNA
tcagctacctgggccacc

SEQ ID NO: 14316 - DNA, 18 bp, synthetic construct
  source 1..18: mol_type = other DNA; mol_type = other DNA
tcagctgactgggccacc

SEQ ID NO: 14317 - DNA, 18 bp, synthetic construct
  source 1..18: mol_type = other DNA; mol_type = other DNA
tcagctgcatgggccacc

SEQ ID NO: 14318 - DNA, 18 bp, synthetic construct
  source 1..18: mol_type = other DNA; mol_type = other DNA
tcagctgcctaggccacc

SEQ ID NO: 14319 - DNA, 18 bp, synthetic construct
  source 1..18: mol_type = other DNA; mol_type = other DNA
tcagctgcctgagccacc

SEQ ID NO: 14320 - DNA, 18 bp, synthetic construct
  source 1..18: mol_type = other DNA; mol_type = other DNA
tcagctgcctgggacacc

SEQ ID NO: 14321 - DNA, 18 bp, synthetic construct
  source 1..18: mol_type = other DNA; mol_type = other DNA
tcagctgcctgggcaacc

SEQ ID NO: 14322 - DNA, 18 bp, synthetic construct
  source 1..18: mol_type = other DNA; mol_type = other DNA
tcagctgcctgggccaac

SEQ ID NO: 14323 - DNA, 18 bp, synthetic construct
  source 1..18: mol_type = other DNA; mol_type = other DNA
tcagctgcctgggccaca

SEQ ID NO: 14324 - DNA, 18 bp, synthetic construct
  source 1..18: mol_type = other DNA; mol_type = other DNA
atcagctgcctgggccac

SEQ ID NO: 14325 - DNA, 18 bp, synthetic construct
  source 1..18: mol_type = other DNA; mol_type = other DNA
ctaagctgcctgggccac

SEQ ID NO: 14326 - DNA, 18 bp, synthetic construct
  source 1..18: mol_type = other DNA; mol_type = other DNA
ctcaactgcctgggccac

SEQ ID NO: 14327 - DNA, 18 bp, synthetic construct
  source 1..18: mol_type = other DNA; mol_type = other DNA
ctcagatgcctgggccac

SEQ ID NO: 14328 - DNA, 18 bp, synthetic construct
  source 1..18: mol_type = other DNA; mol_type = other DNA
ctcagctacctgggccac

SEQ ID NO: 14329 - DNA, 18 bp, synthetic construct
  source 1..18: mol_type = other DNA; mol_type = other DNA
ctcagctgactgggccac

SEQ ID NO: 14330 - DNA, 18 bp, synthetic construct
  source 1..18: mol_type = other DNA; mol_type = other DNA
ctcagctgcatgggccac

SEQ ID NO: 14331 - DNA, 18 bp, synthetic construct
  source 1..18: mol_type = other DNA; mol_type = other DNA
ctcagctgcctaggccac

SEQ ID NO: 14332 - DNA, 18 bp, synthetic construct
  source 1..18: mol_type = other DNA; mol_type = other DNA
ctcagctgcctgagccac

SEQ ID NO: 14333 - DNA, 18 bp, synthetic construct
  source 1..18: mol_type = other DNA; mol_type = other DNA
ctcagctgcctgggacac

SEQ ID NO: 14334 - DNA, 18 bp, synthetic construct
  source 1..18: mol_type = other DNA; mol_type = other DNA
ctcagctgcctgggcaac

SEQ ID NO: 14335 - DNA, 18 bp, synthetic construct
  source 1..18: mol_type = other DNA; mol_type = other DNA
ctcagctgcctgggccaa

SEQ ID NO: 14336 - DNA, 18 bp, synthetic construct
  source 1..18: mol_type = other DNA; mol_type = other DNA
tatcagctgcctgggcca

SEQ ID NO: 14337 - DNA, 18 bp, synthetic construct
  source 1..18: mol_type = other DNA; mol_type = other DNA
tctaagctgcctgggcca

SEQ ID NO: 14338 - DNA, 18 bp, synthetic construct
  source 1..18: mol_type = other DNA; mol_type = other DNA
tctcaactgcctgggcca

SEQ ID NO: 14339 - DNA, 18 bp, synthetic construct
  source 1..18: mol_type = other DNA; mol_type = other DNA
tctcagatgcctgggcca

SEQ ID NO: 14340 - DNA, 18 bp, synthetic construct
  source 1..18: mol_type = other DNA; mol_type = other DNA
tctcagctacctgggcca

SEQ ID NO: 14341 - DNA, 18 bp, synthetic construct
  source 1..18: mol_type = other DNA; mol_type = other DNA
tctcagctgactgggcca

SEQ ID NO: 14342 - DNA, 18 bp, synthetic construct
  source 1..18: mol_type = other DNA; mol_type = other DNA
tctcagctgcatgggcca

SEQ ID NO: 14343 - DNA, 18 bp, synthetic construct
  source 1..18: mol_type = other DNA; mol_type = other DNA
tctcagctgcctaggcca

SEQ ID NO: 14344 - DNA, 18 bp, synthetic construct
  source 1..18: mol_type = other DNA; mol_type = other DNA
tctcagctgcctgagcca

SEQ ID NO: 14345 - DNA, 18 bp, synthetic construct
  source 1..18: mol_type = other DNA; mol_type = other DNA
tctcagctgcctgggaca

SEQ ID NO: 14346 - DNA, 18 bp, synthetic construct
  source 1..18: mol_type = other DNA; mol_type = other DNA
tctcagctgcctgggcaa

SEQ ID NO: 14347 - DNA, 18 bp, synthetic construct
  source 1..18: mol_type = other DNA; mol_type = other DNA
atatcagctgcctgggcc

SEQ ID NO: 14348 - DNA, 18 bp, synthetic construct
  source 1..18: mol_type = other DNA; mol_type = other DNA
atctaagctgcctgggcc

SEQ ID NO: 14349 - DNA, 18 bp, synthetic construct
  source 1..18: mol_type = other DNA; mol_type = other DNA
atctcaactgcctgggcc

SEQ ID NO: 14350 - DNA, 18 bp, synthetic construct
  source 1..18: mol_type = other DNA; mol_type = other DNA
atctcagatgcctgggcc

SEQ ID NO: 14351 - DNA, 18 bp, synthetic construct
  source 1..18: mol_type = other DNA; mol_type = other DNA
atctcagctacctgggcc

SEQ ID NO: 14352 - DNA, 18 bp, synthetic construct
  source 1..18: mol_type = other DNA; mol_type = other DNA
atctcagctgactgggcc

SEQ ID NO: 14353 - DNA, 18 bp, synthetic construct
  source 1..18: mol_type = other DNA; mol_type = other DNA
atctcagctgcatgggcc

SEQ ID NO: 14354 - DNA, 18 bp, synthetic construct
  source 1..18: mol_type = other DNA; mol_type = other DNA
atctcagctgcctaggcc

SEQ ID NO: 14355 - DNA, 18 bp, synthetic construct
  source 1..18: mol_type = other DNA; mol_type = other DNA
atctcagctgcctgagcc

SEQ ID NO: 14356 - DNA, 18 bp, synthetic construct
  source 1..18: mol_type = other DNA; mol_type = other DNA
atctcagctgcctgggac

SEQ ID NO: 14357 - DNA, 18 bp, synthetic construct
  source 1..18: mol_type = other DNA; mol_type = other DNA
atctcagctgcctgggca

SEQ ID NO: 14358 - DNA, 18 bp, synthetic construct
  source 1..18: mol_type = other DNA; mol_type = other DNA
aatctcagctgcctgggc

SEQ ID NO: 14359 - DNA, 18 bp, synthetic construct
  source 1..18: mol_type = other DNA; mol_type = other DNA
catatcagctgcctgggc

SEQ ID NO: 14360 - DNA, 18 bp, synthetic construct
  source 1..18: mol_type = other DNA; mol_type = other DNA
catctaagctgcctgggc

SEQ ID NO: 14361 - DNA, 18 bp, synthetic construct
  source 1..18: mol_type = other DNA; mol_type = other DNA
catctcaactgcctgggc

SEQ ID NO: 14362 - DNA, 18 bp, synthetic construct
  source 1..18: mol_type = other DNA; mol_type = other DNA
catctcagatgcctgggc

SEQ ID NO: 14363 - DNA, 18 bp, synthetic construct
  source 1..18: mol_type = other DNA; mol_type = other DNA
catctcagctacctgggc

SEQ ID NO: 14364 - DNA, 18 bp, synthetic construct
  source 1..18: mol_type = other DNA; mol_type = other DNA
catctcagctgactgggc

SEQ ID NO: 14365 - DNA, 18 bp, synthetic construct
  source 1..18: mol_type = other DNA; mol_type = other DNA
catctcagctgcatgggc

SEQ ID NO: 14366 - DNA, 18 bp, synthetic construct
  source 1..18: mol_type = other DNA; mol_type = other DNA
catctcagctgcctaggc

SEQ ID NO: 14367 - DNA, 18 bp, synthetic construct
  source 1..18: mol_type = other DNA; mol_type = other DNA
catctcagctgcctgagc

SEQ ID NO: 14368 - DNA, 18 bp, synthetic construct
  source 1..18: mol_type = other DNA; mol_type = other DNA
catctcagctgcctggga

SEQ ID NO: 14369 - DNA, 18 bp, synthetic construct
  source 1..18: mol_type = other DNA; mol_type = other DNA
acatctcagctgcctggg

SEQ ID NO: 14370 - DNA, 18 bp, synthetic construct
  source 1..18: mol_type = other DNA; mol_type = other DNA
caatctcagctgcctggg

SEQ ID NO: 14371 - DNA, 18 bp, synthetic construct
  source 1..18: mol_type = other DNA; mol_type = other DNA
ccatatcagctgcctggg

SEQ ID NO: 14372 - DNA, 18 bp, synthetic construct
  source 1..18: mol_type = other DNA; mol_type = other DNA
ccatctaagctgcctggg

SEQ ID NO: 14373 - DNA, 18 bp, synthetic construct
  source 1..18: mol_type = other DNA; mol_type = other DNA
ccatctcaactgcctggg

SEQ ID NO: 14374 - DNA, 18 bp, synthetic construct
  source 1..18: mol_type = other DNA; mol_type = other DNA
ccatctcagatgcctggg

SEQ ID NO: 14375 - DNA, 18 bp, synthetic construct
  source 1..18: mol_type = other DNA; mol_type = other DNA
ccatctcagctacctggg

SEQ ID NO: 14376 - DNA, 18 bp, synthetic construct
  source 1..18: mol_type = other DNA; mol_type = other DNA
ccatctcagctgactggg

SEQ ID NO: 14377 - DNA, 18 bp, synthetic construct
  source 1..18: mol_type = other DNA; mol_type = other DNA
ccatctcagctgcatggg

SEQ ID NO: 14378 - DNA, 18 bp, synthetic construct
  source 1..18: mol_type = other DNA; mol_type = other DNA
ccatctcagctgcctagg

SEQ ID NO: 14379 - DNA, 18 bp, synthetic construct
  source 1..18: mol_type = other DNA; mol_type = other DNA
ccatctcagctgcctgag

SEQ ID NO: 14380 - DNA, 18 bp, synthetic construct
  source 1..18: mol_type = other DNA; mol_type = other DNA
tacatctcagctgcctgg

SEQ ID NO: 14381 - DNA, 18 bp, synthetic construct
  source 1..18: mol_type = other DNA; mol_type = other DNA
tcaatctcagctgcctgg

SEQ ID NO: 14382 - DNA, 18 bp, synthetic construct
  source 1..18: mol_type = other DNA; mol_type = other DNA
tccatatcagctgcctgg

SEQ ID NO: 14383 - DNA, 18 bp, synthetic construct
  source 1..18: mol_type = other DNA; mol_type = other DNA
tccatctaagctgcctgg

SEQ ID NO: 14384 - DNA, 18 bp, synthetic construct
  source 1..18: mol_type = other DNA; mol_type = other DNA
tccatctcaactgcctgg

SEQ ID NO: 14385 - DNA, 18 bp, synthetic construct
  source 1..18: mol_type = other DNA; mol_type = other DNA
tccatctcagatgcctgg

SEQ ID NO: 14386 - DNA, 18 bp, synthetic construct
  source 1..18: mol_type = other DNA; mol_type = other DNA
tccatctcagctacctgg

SEQ ID NO: 14387 - DNA, 18 bp, synthetic construct
  source 1..18: mol_type = other DNA; mol_type = other DNA
tccatctcagctgactgg

SEQ ID NO: 14388 - DNA, 18 bp, synthetic construct
  source 1..18: mol_type = other DNA; mol_type = other DNA
tccatctcagctgcatgg

SEQ ID NO: 14389 - DNA, 18 bp, synthetic construct
  source 1..18: mol_type = other DNA; mol_type = other DNA
tccatctcagctgcctag

SEQ ID NO: 14390 - DNA, 18 bp, synthetic construct
  source 1..18: mol_type = other DNA; mol_type = other DNA
atccatctcagctgcctg

SEQ ID NO: 14391 - DNA, 18 bp, synthetic construct
  source 1..18: mol_type = other DNA; mol_type = other DNA
ctacatctcagctgcctg

SEQ ID NO: 14392 - DNA, 18 bp, synthetic construct
  source 1..18: mol_type = other DNA; mol_type = other DNA
ctcaatctcagctgcctg

SEQ ID NO: 14393 - DNA, 18 bp, synthetic construct
  source 1..18: mol_type = other DNA; mol_type = other DNA
ctccatatcagctgcctg

SEQ ID NO: 14394 - DNA, 18 bp, synthetic construct
  source 1..18: mol_type = other DNA; mol_type = other DNA
ctccatctaagctgcctg

SEQ ID NO: 14395 - DNA, 18 bp, synthetic construct
  source 1..18: mol_type = other DNA; mol_type = other DNA
ctccatctcaactgcctg

SEQ ID NO: 14396 - DNA, 18 bp, synthetic construct
  source 1..18: mol_type = other DNA; mol_type = other DNA
ctccatctcagatgcctg

SEQ ID NO: 14397 - DNA, 18 bp, synthetic construct
  source 1..18: mol_type = other DNA; mol_type = other DNA
ctccatctcagctacctg

SEQ ID NO: 14398 - DNA, 18 bp, synthetic construct
  source 1..18: mol_type = other DNA; mol_type = other DNA
ctccatctcagctgactg

SEQ ID NO: 14399 - DNA, 18 bp, synthetic construct
  source 1..18: mol_type = other DNA; mol_type = other DNA
ctccatctcagctgcatg

SEQ ID NO: 14400 - DNA, 18 bp, synthetic construct
  source 1..18: mol_type = other DNA; mol_type = other DNA
actccatctcagctgcct

SEQ ID NO: 14401 - DNA, 18 bp, synthetic construct
  source 1..18: mol_type = other DNA; mol_type = other DNA
gatccatctcagctgcct

SEQ ID NO: 14402 - DNA, 18 bp, synthetic construct
  source 1..18: mol_type = other DNA; mol_type = other DNA
gctacatctcagctgcct

SEQ ID NO: 14403 - DNA, 18 bp, synthetic construct
  source 1..18: mol_type = other DNA; mol_type = other DNA
gctcaatctcagctgcct

SEQ ID NO: 14404 - DNA, 18 bp, synthetic construct
  source 1..18: mol_type = other DNA; mol_type = other DNA
gctccatatcagctgcct

SEQ ID NO: 14405 - DNA, 18 bp, synthetic construct
  source 1..18: mol_type = other DNA; mol_type = other DNA
gctccatctaagctgcct

SEQ ID NO: 14406 - DNA, 18 bp, synthetic construct
  source 1..18: mol_type = other DNA; mol_type = other DNA
gctccatctcaactgcct

SEQ ID NO: 14407 - DNA, 18 bp, synthetic construct
  source 1..18: mol_type = other DNA; mol_type = other DNA
gctccatctcagatgcct

SEQ ID NO: 14408 - DNA, 18 bp, synthetic construct
  source 1..18: mol_type = other DNA; mol_type = other DNA
gctccatctcagctgact

SEQ ID NO: 14409 - DNA, 18 bp, synthetic construct
  source 1..18: mol_type = other DNA; mol_type = other DNA
gctccatctcagctgcat

SEQ ID NO: 14410 - DNA, 18 bp, synthetic construct
  source 1..18: mol_type = other DNA; mol_type = other DNA
agctccatctcagctgcc

SEQ ID NO: 14411 - DNA, 18 bp, synthetic construct
  source 1..18: mol_type = other DNA; mol_type = other DNA
gactccatctcagctgcc

SEQ ID NO: 14412 - DNA, 18 bp, synthetic construct
  source 1..18: mol_type = other DNA; mol_type = other DNA
ggatccatctcagctgcc

SEQ ID NO: 14413 - DNA, 18 bp, synthetic construct
  source 1..18: mol_type = other DNA; mol_type = other DNA
ggctacatctcagctgcc

SEQ ID NO: 14414 - DNA, 18 bp, synthetic construct
  source 1..18: mol_type = other DNA; mol_type = other DNA
ggctcaatctcagctgcc

SEQ ID NO: 14415 - DNA, 18 bp, synthetic construct
  source 1..18: mol_type = other DNA; mol_type = other DNA
ggctccatatcagctgcc

SEQ ID NO: 14416 - DNA, 18 bp, synthetic construct
  source 1..18: mol_type = other DNA; mol_type = other DNA
ggctccatctaagctgcc

SEQ ID NO: 14417 - DNA, 18 bp, synthetic construct
  source 1..18: mol_type = other DNA; mol_type = other DNA
ggctccatctcaactgcc

SEQ ID NO: 14418 - DNA, 18 bp, synthetic construct
  source 1..18: mol_type = other DNA; mol_type = other DNA
ggctccatctcagatgcc

SEQ ID NO: 14419 - DNA, 18 bp, synthetic construct
  source 1..18: mol_type = other DNA; mol_type = other DNA
ggctccatctcagctgac

SEQ ID NO: 14420 - DNA, 18 bp, synthetic construct
  source 1..18: mol_type = other DNA; mol_type = other DNA
ggctccatctcagctgca

SEQ ID NO: 14421 - DNA, 18 bp, synthetic construct
  source 1..18: mol_type = other DNA; mol_type = other DNA
aagctccatctcagctgc

SEQ ID NO: 14422 - DNA, 18 bp, synthetic construct
  source 1..18: mol_type = other DNA; mol_type = other DNA
agactccatctcagctgc

SEQ ID NO: 14423 - DNA, 18 bp, synthetic construct
  source 1..18: mol_type = other DNA; mol_type = other DNA
aggatccatctcagctgc

SEQ ID NO: 14424 - DNA, 18 bp, synthetic construct
  source 1..18: mol_type = other DNA; mol_type = other DNA
aggctacatctcagctgc

SEQ ID NO: 14425 - DNA, 18 bp, synthetic construct
  source 1..18: mol_type = other DNA; mol_type = other DNA
aggctcaatctcagctgc

SEQ ID NO: 14426 - DNA, 18 bp, synthetic construct
  source 1..18: mol_type = other DNA; mol_type = other DNA
aggctccatatcagctgc

SEQ ID NO: 14427 - DNA, 18 bp, synthetic construct
  source 1..18: mol_type = other DNA; mol_type = other DNA
aggctccatctaagctgc

SEQ ID NO: 14428 - DNA, 18 bp, synthetic construct
  source 1..18: mol_type = other DNA; mol_type = other DNA
aggctccatctcaactgc

SEQ ID NO: 14429 - DNA, 18 bp, synthetic construct
  source 1..18: mol_type = other DNA; mol_type = other DNA
aggctccatctcagatgc

SEQ ID NO: 14430 - DNA, 18 bp, synthetic construct
  source 1..18: mol_type = other DNA; mol_type = other DNA
aggctccatctcagctga

SEQ ID NO: 14431 - DNA, 18 bp, synthetic construct
  source 1..18: mol_type = other DNA; mol_type = other DNA
aaggctccatctcagctg

SEQ ID NO: 14432 - DNA, 18 bp, synthetic construct
  source 1..18: mol_type = other DNA; mol_type = other DNA
gaagctccatctcagctg

SEQ ID NO: 14433 - DNA, 18 bp, synthetic construct
  source 1..18: mol_type = other DNA; mol_type = other DNA
gagactccatctcagctg

SEQ ID NO: 14434 - DNA, 18 bp, synthetic construct
  source 1..18: mol_type = other DNA; mol_type = other DNA
gaggatccatctcagctg

SEQ ID NO: 14435 - DNA, 18 bp, synthetic construct
  source 1..18: mol_type = other DNA; mol_type = other DNA
gaggctacatctcagctg

SEQ ID NO: 14436 - DNA, 18 bp, synthetic construct
  source 1..18: mol_type = other DNA; mol_type = other DNA
gaggctcaatctcagctg

SEQ ID NO: 14437 - DNA, 18 bp, synthetic construct
  source 1..18: mol_type = other DNA; mol_type = other DNA
gaggctccatatcagctg

SEQ ID NO: 14438 - DNA, 18 bp, synthetic construct
  source 1..18: mol_type = other DNA; mol_type = other DNA
gaggctccatctaagctg

SEQ ID NO: 14439 - DNA, 18 bp, synthetic construct
  source 1..18: mol_type = other DNA; mol_type = other DNA
gaggctccatctcaactg

SEQ ID NO: 14440 - DNA, 18 bp, synthetic construct
  source 1..18: mol_type = other DNA; mol_type = other DNA
gaggctccatctcagatg

SEQ ID NO: 14441 - DNA, 18 bp, synthetic construct
  source 1..18: mol_type = other DNA; mol_type = other DNA
agaggctccatctcagct

SEQ ID NO: 14442 - DNA, 18 bp, synthetic construct
  source 1..18: mol_type = other DNA; mol_type = other DNA
gaaggctccatctcagct

SEQ ID NO: 14443 - DNA, 18 bp, synthetic construct
  source 1..18: mol_type = other DNA; mol_type = other DNA
ggaagctccatctcagct

SEQ ID NO: 14444 - DNA, 18 bp, synthetic construct
  source 1..18: mol_type = other DNA; mol_type = other DNA
ggagactccatctcagct

SEQ ID NO: 14445 - DNA, 18 bp, synthetic construct
  source 1..18: mol_type = other DNA; mol_type = other DNA
ggaggatccatctcagct

SEQ ID NO: 14446 - DNA, 18 bp, synthetic construct
  source 1..18: mol_type = other DNA; mol_type = other DNA
ggaggctacatctcagct

SEQ ID NO: 14447 - DNA, 18 bp, synthetic construct
  source 1..18: mol_type = other DNA; mol_type = other DNA
ggaggctcaatctcagct

SEQ ID NO: 14448 - DNA, 18 bp, synthetic construct
  source 1..18: mol_type = other DNA; mol_type = other DNA
ggaggctccatatcagct

SEQ ID NO: 14449 - DNA, 18 bp, synthetic construct
  source 1..18: mol_type = other DNA; mol_type = other DNA
ggaggctccatctaagct

SEQ ID NO: 14450 - DNA, 18 bp, synthetic construct
  source 1..18: mol_type = other DNA; mol_type = other DNA
ggaggctccatctcagat

SEQ ID NO: 14451 - DNA, 18 bp, synthetic construct
  source 1..18: mol_type = other DNA; mol_type = other DNA
atgaggctccatctcagc

SEQ ID NO: 14452 - DNA, 18 bp, synthetic construct
  source 1..18: mol_type = other DNA; mol_type = other DNA
agtaggctccatctcagc

SEQ ID NO: 14453 - DNA, 18 bp, synthetic construct
  source 1..18: mol_type = other DNA; mol_type = other DNA
aggatgctccatctcagc

SEQ ID NO: 14454 - DNA, 18 bp, synthetic construct
  source 1..18: mol_type = other DNA; mol_type = other DNA
aggagtctccatctcagc

SEQ ID NO: 14455 - DNA, 18 bp, synthetic construct
  source 1..18: mol_type = other DNA; mol_type = other DNA
aggaggttccatctcagc

SEQ ID NO: 14456 - DNA, 18 bp, synthetic construct
  source 1..18: mol_type = other DNA; mol_type = other DNA
aggaggcttcatctcagc

SEQ ID NO: 14457 - DNA, 18 bp, synthetic construct
  source 1..18: mol_type = other DNA; mol_type = other DNA
aggaggctctatctcagc

SEQ ID NO: 14458 - DNA, 18 bp, synthetic construct
  source 1..18: mol_type = other DNA; mol_type = other DNA
aggaggctccatttcagc

SEQ ID NO: 14459 - DNA, 18 bp, synthetic construct
  source 1..18: mol_type = other DNA; mol_type = other DNA
aggaggctccatcttagc

SEQ ID NO: 14460 - DNA, 18 bp, synthetic construct
  source 1..18: mol_type = other DNA; mol_type = other DNA
aggaggctccatctcatc

SEQ ID NO: 14461 - DNA, 18 bp, synthetic construct
  source 1..18: mol_type = other DNA; mol_type = other DNA
aggaggctccatctcagt

SEQ ID NO: 14462 - DNA, 18 bp, synthetic construct
  source 1..18: mol_type = other DNA; mol_type = other DNA
aatgaggctccatctcag

SEQ ID NO: 14463 - DNA, 18 bp, synthetic construct
  source 1..18: mol_type = other DNA; mol_type = other DNA
aagtaggctccatctcag

SEQ ID NO: 14464 - DNA, 18 bp, synthetic construct
  source 1..18: mol_type = other DNA; mol_type = other DNA
aaggatgctccatctcag

SEQ ID NO: 14465 - DNA, 18 bp, synthetic construct
  source 1..18: mol_type = other DNA; mol_type = other DNA
aaggagtctccatctcag

SEQ ID NO: 14466 - DNA, 18 bp, synthetic construct
  source 1..18: mol_type = other DNA; mol_type = other DNA
aaggaggttccatctcag

SEQ ID NO: 14467 - DNA, 18 bp, synthetic construct
  source 1..18: mol_type = other DNA; mol_type = other DNA
aaggaggcttcatctcag

SEQ ID NO: 14468 - DNA, 18 bp, synthetic construct
  source 1..18: mol_type = other DNA; mol_type = other DNA
aaggaggctctatctcag

SEQ ID NO: 14469 - DNA, 18 bp, synthetic construct
  source 1..18: mol_type = other DNA; mol_type = other DNA
aaggaggctccatttcag

SEQ ID NO: 14470 - DNA, 18 bp, synthetic construct
  source 1..18: mol_type = other DNA; mol_type = other DNA
aaggaggctccatcttag

SEQ ID NO: 14471 - DNA, 18 bp, synthetic construct
  source 1..18: mol_type = other DNA; mol_type = other DNA
aaggaggctccatctcat

SEQ ID NO: 14472 - DNA, 18 bp, synthetic construct
  source 1..18: mol_type = other DNA; mol_type = other DNA
taaggaggctccatctca

SEQ ID NO: 14473 - DNA, 18 bp, synthetic construct
  source 1..18: mol_type = other DNA; mol_type = other DNA
caatgaggctccatctca

SEQ ID NO: 14474 - DNA, 18 bp, synthetic construct
  source 1..18: mol_type = other DNA; mol_type = other DNA
caagtaggctccatctca

SEQ ID NO: 14475 - DNA, 18 bp, synthetic construct
  source 1..18: mol_type = other DNA; mol_type = other DNA
caaggatgctccatctca

SEQ ID NO: 14476 - DNA, 18 bp, synthetic construct
  source 1..18: mol_type = other DNA; mol_type = other DNA
caaggagtctccatctca

SEQ ID NO: 14477 - DNA, 18 bp, synthetic construct
  source 1..18: mol_type = other DNA; mol_type = other DNA
caaggaggttccatctca

SEQ ID NO: 14478 - DNA, 18 bp, synthetic construct
  source 1..18: mol_type = other DNA; mol_type = other DNA
caaggaggcttcatctca

SEQ ID NO: 14479 - DNA, 18 bp, synthetic construct
  source 1..18: mol_type = other DNA; mol_type = other DNA
caaggaggctctatctca

SEQ ID NO: 14480 - DNA, 18 bp, synthetic construct
  source 1..18: mol_type = other DNA; mol_type = other DNA
caaggaggctccatttca

SEQ ID NO: 14481 - DNA, 18 bp, synthetic construct
  source 1..18: mol_type = other DNA; mol_type = other DNA
caaggaggctccatctta

SEQ ID NO: 14482 - DNA, 18 bp, synthetic construct
  source 1..18: mol_type = other DNA; mol_type = other DNA
tcaaggaggctccatctc

SEQ ID NO: 14483 - DNA, 18 bp, synthetic construct
  source 1..18: mol_type = other DNA; mol_type = other DNA
gtaaggaggctccatctc

SEQ ID NO: 14484 - DNA, 18 bp, synthetic construct
  source 1..18: mol_type = other DNA; mol_type = other DNA
gcaatgaggctccatctc

SEQ ID NO: 14485 - DNA, 18 bp, synthetic construct
  source 1..18: mol_type = other DNA; mol_type = other DNA
gcaagtaggctccatctc

SEQ ID NO: 14486 - DNA, 18 bp, synthetic construct
  source 1..18: mol_type = other DNA; mol_type = other DNA
gcaaggatgctccatctc

SEQ ID NO: 14487 - DNA, 18 bp, synthetic construct
  source 1..18: mol_type = other DNA; mol_type = other DNA
gcaaggagtctccatctc

SEQ ID NO: 14488 - DNA, 18 bp, synthetic construct
  source 1..18: mol_type = other DNA; mol_type = other DNA
gcaaggaggttccatctc

SEQ ID NO: 14489 - DNA, 18 bp, synthetic construct
  source 1..18: mol_type = other DNA; mol_type = other DNA
gcaaggaggcttcatctc

SEQ ID NO: 14490 - DNA, 18 bp, synthetic construct
  source 1..18: mol_type = other DNA; mol_type = other DNA
gcaaggaggctctatctc

SEQ ID NO: 14491 - DNA, 18 bp, synthetic construct
  source 1..18: mol_type = other DNA; mol_type = other DNA
gcaaggaggctccatttc

SEQ ID NO: 14492 - DNA, 18 bp, synthetic construct
  source 1..18: mol_type = other DNA; mol_type = other DNA
gcaaggaggctccatctt

SEQ ID NO: 14493 - DNA, 18 bp, synthetic construct
  source 1..18: mol_type = other DNA; mol_type = other DNA
atcaaggaggctccatct

SEQ ID NO: 14494 - DNA, 18 bp, synthetic construct
  source 1..18: mol_type = other DNA; mol_type = other DNA
agtaaggaggctccatct

SEQ ID NO: 14495 - DNA, 18 bp, synthetic construct
  source 1..18: mol_type = other DNA; mol_type = other DNA
agcaatgaggctccatct

SEQ ID NO: 14496 - DNA, 18 bp, synthetic construct
  source 1..18: mol_type = other DNA; mol_type = other DNA
agcaagtaggctccatct

SEQ ID NO: 14497 - DNA, 18 bp, synthetic construct
  source 1..18: mol_type = other DNA; mol_type = other DNA
agcaaggatgctccatct

SEQ ID NO: 14498 - DNA, 18 bp, synthetic construct
  source 1..18: mol_type = other DNA; mol_type = other DNA
agcaaggagtctccatct

SEQ ID NO: 14499 - DNA, 18 bp, synthetic construct
  source 1..18: mol_type = other DNA; mol_type = other DNA
agcaaggaggttccatct

SEQ ID NO: 14500 - DNA, 18 bp, synthetic construct
  source 1..18: mol_type = other DNA; mol_type = other DNA
agcaaggaggcttcatct

SEQ ID NO: 14501 - DNA, 18 bp, synthetic construct
  source 1..18: mol_type = other DNA; mol_type = other DNA
agcaaggaggctctatct

SEQ ID NO: 14502 - DNA, 18 bp, synthetic construct
  source 1..18: mol_type = other DNA; mol_type = other DNA
agcaaggaggctccattt

SEQ ID NO: 14503 - DNA, 18 bp, synthetic construct
  source 1..18: mol_type = other DNA; mol_type = other DNA
tagcaaggaggctccatc

SEQ ID NO: 14504 - DNA, 18 bp, synthetic construct
  source 1..18: mol_type = other DNA; mol_type = other DNA
catcaaggaggctccatc

SEQ ID NO: 14505 - DNA, 18 bp, synthetic construct
  source 1..18: mol_type = other DNA; mol_type = other DNA
cagtaaggaggctccatc

SEQ ID NO: 14506 - DNA, 18 bp, synthetic construct
  source 1..18: mol_type = other DNA; mol_type = other DNA
cagcaatgaggctccatc

SEQ ID NO: 14507 - DNA, 18 bp, synthetic construct
  source 1..18: mol_type = other DNA; mol_type = other DNA
cagcaagtaggctccatc

SEQ ID NO: 14508 - DNA, 18 bp, synthetic construct
  source 1..18: mol_type = other DNA; mol_type = other DNA
cagcaaggatgctccatc

SEQ ID NO: 14509 - DNA, 18 bp, synthetic construct
  source 1..18: mol_type = other DNA; mol_type = other DNA
cagcaaggagtctccatc

SEQ ID NO: 14510 - DNA, 18 bp, synthetic construct
  source 1..18: mol_type = other DNA; mol_type = other DNA
cagcaaggaggttccatc

SEQ ID NO: 14511 - DNA, 18 bp, synthetic construct
  source 1..18: mol_type = other DNA; mol_type = other DNA
cagcaaggaggcttcatc

SEQ ID NO: 14512 - DNA, 18 bp, synthetic construct
  source 1..18: mol_type = other DNA; mol_type = other DNA
cagcaaggaggctctatc

SEQ ID NO: 14513 - DNA, 18 bp, synthetic construct
  source 1..18: mol_type = other DNA; mol_type = other DNA
cagcaaggaggctccatt

SEQ ID NO: 14514 - DNA, 18 bp, synthetic construct
  source 1..18: mol_type = other DNA; mol_type = other DNA
atagcaaggaggctccat

SEQ ID NO: 14515 - DNA, 18 bp, synthetic construct
  source 1..18: mol_type = other DNA; mol_type = other DNA
acatcaaggaggctccat

SEQ ID NO: 14516 - DNA, 18 bp, synthetic construct
  source 1..18: mol_type = other DNA; mol_type = other DNA
acagtaaggaggctccat

SEQ ID NO: 14517 - DNA, 18 bp, synthetic construct
  source 1..18: mol_type = other DNA; mol_type = other DNA
acagcaatgaggctccat

SEQ ID NO: 14518 - DNA, 18 bp, synthetic construct
  source 1..18: mol_type = other DNA; mol_type = other DNA
acagcaagtaggctccat

SEQ ID NO: 14519 - DNA, 18 bp, synthetic construct
  source 1..18: mol_type = other DNA; mol_type = other DNA
acagcaaggatgctccat

SEQ ID NO: 14520 - DNA, 18 bp, synthetic construct
  source 1..18: mol_type = other DNA; mol_type = other DNA
acagcaaggagtctccat

SEQ ID NO: 14521 - DNA, 18 bp, synthetic construct
  source 1..18: mol_type = other DNA; mol_type = other DNA
acagcaaggaggttccat

SEQ ID NO: 14522 - DNA, 18 bp, synthetic construct
  source 1..18: mol_type = other DNA; mol_type = other DNA
acagcaaggaggcttcat

SEQ ID NO: 14523 - DNA, 18 bp, synthetic construct
  source 1..18: mol_type = other DNA; mol_type = other DNA
acagcaaggaggctctat

SEQ ID NO: 14524 - DNA, 18 bp, synthetic construct
  source 1..18: mol_type = other DNA; mol_type = other DNA
tacagcaaggaggctcca

SEQ ID NO: 14525 - DNA, 18 bp, synthetic construct
  source 1..18: mol_type = other DNA; mol_type = other DNA
catagcaaggaggctcca

SEQ ID NO: 14526 - DNA, 18 bp, synthetic construct
  source 1..18: mol_type = other DNA; mol_type = other DNA
cacatcaaggaggctcca

SEQ ID NO: 14527 - DNA, 18 bp, synthetic construct
  source 1..18: mol_type = other DNA; mol_type = other DNA
cacagtaaggaggctcca

SEQ ID NO: 14528 - DNA, 18 bp, synthetic construct
  source 1..18: mol_type = other DNA; mol_type = other DNA
cacagcaatgaggctcca

SEQ ID NO: 14529 - DNA, 18 bp, synthetic construct
  source 1..18: mol_type = other DNA; mol_type = other DNA
cacagcaagtaggctcca

SEQ ID NO: 14530 - DNA, 18 bp, synthetic construct
  source 1..18: mol_type = other DNA; mol_type = other DNA
cacagcaaggatgctcca

SEQ ID NO: 14531 - DNA, 18 bp, synthetic construct
  source 1..18: mol_type = other DNA; mol_type = other DNA
cacagcaaggagtctcca

SEQ ID NO: 14532 - DNA, 18 bp, synthetic construct
  source 1..18: mol_type = other DNA; mol_type = other DNA
cacagcaaggaggttcca

SEQ ID NO: 14533 - DNA, 18 bp, synthetic construct
  source 1..18: mol_type = other DNA; mol_type = other DNA
cacagcaaggaggcttca

SEQ ID NO: 14534 - DNA, 18 bp, synthetic construct
  source 1..18: mol_type = other DNA; mol_type = other DNA
cacagcaaggaggctcta

SEQ ID NO: 14535 - DNA, 18 bp, synthetic construct
  source 1..18: mol_type = other DNA; mol_type = other DNA
tcacagcaaggaggctcc

SEQ ID NO: 14536 - DNA, 18 bp, synthetic construct
  source 1..18: mol_type = other DNA; mol_type = other DNA
gtacagcaaggaggctcc

SEQ ID NO: 14537 - DNA, 18 bp, synthetic construct
  source 1..18: mol_type = other DNA; mol_type = other DNA
gcatagcaaggaggctcc

SEQ ID NO: 14538 - DNA, 18 bp, synthetic construct
  source 1..18: mol_type = other DNA; mol_type = other DNA
gcacatcaaggaggctcc

SEQ ID NO: 14539 - DNA, 18 bp, synthetic construct
  source 1..18: mol_type = other DNA; mol_type = other DNA
gcacagtaaggaggctcc

SEQ ID NO: 14540 - DNA, 18 bp, synthetic construct
  source 1..18: mol_type = other DNA; mol_type = other DNA
gcacagcaatgaggctcc

SEQ ID NO: 14541 - DNA, 18 bp, synthetic construct
  source 1..18: mol_type = other DNA; mol_type = other DNA
gcacagcaagtaggctcc

SEQ ID NO: 14542 - DNA, 18 bp, synthetic construct
  source 1..18: mol_type = other DNA; mol_type = other DNA
gcacagcaaggatgctcc

SEQ ID NO: 14543 - DNA, 18 bp, synthetic construct
  source 1..18: mol_type = other DNA; mol_type = other DNA
gcacagcaaggagtctcc

SEQ ID NO: 14544 - DNA, 18 bp, synthetic construct
  source 1..18: mol_type = other DNA; mol_type = other DNA
gcacagcaaggaggttcc

SEQ ID NO: 14545 - DNA, 18 bp, synthetic construct
  source 1..18: mol_type = other DNA; mol_type = other DNA
gcacagcaaggaggcttc

SEQ ID NO: 14546 - DNA, 18 bp, synthetic construct
  source 1..18: mol_type = other DNA; mol_type = other DNA
gcacagcaaggaggctct

SEQ ID NO: 14547 - DNA, 18 bp, synthetic construct
  source 1..18: mol_type = other DNA; mol_type = other DNA
ttcacagcaaggaggctc

SEQ ID NO: 14548 - DNA, 18 bp, synthetic construct
  source 1..18: mol_type = other DNA; mol_type = other DNA
tgtacagcaaggaggctc

SEQ ID NO: 14549 - DNA, 18 bp, synthetic construct
  source 1..18: mol_type = other DNA; mol_type = other DNA
tgcatagcaaggaggctc

SEQ ID NO: 14550 - DNA, 18 bp, synthetic construct
  source 1..18: mol_type = other DNA; mol_type = other DNA
tgcacatcaaggaggctc

SEQ ID NO: 14551 - DNA, 18 bp, synthetic construct
  source 1..18: mol_type = other DNA; mol_type = other DNA
tgcacagtaaggaggctc

SEQ ID NO: 14552 - DNA, 18 bp, synthetic construct
  source 1..18: mol_type = other DNA; mol_type = other DNA
tgcacagcaatgaggctc

SEQ ID NO: 14553 - DNA, 18 bp, synthetic construct
  source 1..18: mol_type = other DNA; mol_type = other DNA
tgcacagcaagtaggctc

SEQ ID NO: 14554 - DNA, 18 bp, synthetic construct
  source 1..18: mol_type = other DNA; mol_type = other DNA
tgcacagcaaggatgctc

SEQ ID NO: 14555 - DNA, 18 bp, synthetic construct
  source 1..18: mol_type = other DNA; mol_type = other DNA
tgcacagcaaggagtctc

SEQ ID NO: 14556 - DNA, 18 bp, synthetic construct
  source 1..18: mol_type = other DNA; mol_type = other DNA
tgcacagcaaggaggttc

SEQ ID NO: 14557 - DNA, 18 bp, synthetic construct
  source 1..18: mol_type = other DNA; mol_type = other DNA
tgcacagcaaggaggctt

SEQ ID NO: 14558 - DNA, 18 bp, synthetic construct
  source 1..18: mol_type = other DNA; mol_type = other DNA
ttgcacagcaaggaggct

SEQ ID NO: 14559 - DNA, 18 bp, synthetic construct
  source 1..18: mol_type = other DNA; mol_type = other DNA
cttcacagcaaggaggct

SEQ ID NO: 14560 - DNA, 18 bp, synthetic construct
  source 1..18: mol_type = other DNA; mol_type = other DNA
ctgtacagcaaggaggct

SEQ ID NO: 14561 - DNA, 18 bp, synthetic construct
  source 1..18: mol_type = other DNA; mol_type = other DNA
ctgcatagcaaggaggct

SEQ ID NO: 14562 - DNA, 18 bp, synthetic construct
  source 1..18: mol_type = other DNA; mol_type = other DNA
ctgcacatcaaggaggct

SEQ ID NO: 14563 - DNA, 18 bp, synthetic construct
  source 1..18: mol_type = other DNA; mol_type = other DNA
ctgcacagtaaggaggct

SEQ ID NO: 14564 - DNA, 18 bp, synthetic construct
  source 1..18: mol_type = other DNA; mol_type = other DNA
ctgcacagcaatgaggct

SEQ ID NO: 14565 - DNA, 18 bp, synthetic construct
  source 1..18: mol_type = other DNA; mol_type = other DNA
ctgcacagcaagtaggct

SEQ ID NO: 14566 - DNA, 18 bp, synthetic construct
  source 1..18: mol_type = other DNA; mol_type = other DNA
ctgcacagcaaggatgct

SEQ ID NO: 14567 - DNA, 18 bp, synthetic construct
  source 1..18: mol_type = other DNA; mol_type = other DNA
ctgcacagcaaggagtct

SEQ ID NO: 14568 - DNA, 18 bp, synthetic construct
  source 1..18: mol_type = other DNA; mol_type = other DNA
ctgcacagcaaggaggtt

SEQ ID NO: 14569 - DNA, 18 bp, synthetic construct
  source 1..18: mol_type = other DNA; mol_type = other DNA
tttgcacagcaaggaggc

SEQ ID NO: 14570 - DNA, 18 bp, synthetic construct
  source 1..18: mol_type = other DNA; mol_type = other DNA
tcttcacagcaaggaggc

SEQ ID NO: 14571 - DNA, 18 bp, synthetic construct
  source 1..18: mol_type = other DNA; mol_type = other DNA
tctgtacagcaaggaggc

SEQ ID NO: 14572 - DNA, 18 bp, synthetic construct
  source 1..18: mol_type = other DNA; mol_type = other DNA
tctgcatagcaaggaggc

SEQ ID NO: 14573 - DNA, 18 bp, synthetic construct
  source 1..18: mol_type = other DNA; mol_type = other DNA
tctgcacatcaaggaggc

SEQ ID NO: 14574 - DNA, 18 bp, synthetic construct
  source 1..18: mol_type = other DNA; mol_type = other DNA
tctgcacagtaaggaggc

SEQ ID NO: 14575 - DNA, 18 bp, synthetic construct
  source 1..18: mol_type = other DNA; mol_type = other DNA
tctgcacagcaatgaggc

SEQ ID NO: 14576 - DNA, 18 bp, synthetic construct
  source 1..18: mol_type = other DNA; mol_type = other DNA
tctgcacagcaagtaggc

SEQ ID NO: 14577 - DNA, 18 bp, synthetic construct
  source 1..18: mol_type = other DNA; mol_type = other DNA
tctgcacagcaaggatgc

SEQ ID NO: 14578 - DNA, 18 bp, synthetic construct
  source 1..18: mol_type = other DNA; mol_type = other DNA
tctgcacagcaaggagtc

SEQ ID NO: 14579 - DNA, 18 bp, synthetic construct
  source 1..18: mol_type = other DNA; mol_type = other DNA
tctgcacagcaaggaggt

SEQ ID NO: 14580 - DNA, 18 bp, synthetic construct
  source 1..18: mol_type = other DNA; mol_type = other DNA
ttctgcacagcaaggagg

SEQ ID NO: 14581 - DNA, 18 bp, synthetic construct
  source 1..18: mol_type = other DNA; mol_type = other DNA
ctttgcacagcaaggagg

SEQ ID NO: 14582 - DNA, 18 bp, synthetic construct
  source 1..18: mol_type = other DNA; mol_type = other DNA
ctcttcacagcaaggagg

SEQ ID NO: 14583 - DNA, 18 bp, synthetic construct
  source 1..18: mol_type = other DNA; mol_type = other DNA
ctctgtacagcaaggagg

SEQ ID NO: 14584 - DNA, 18 bp, synthetic construct
  source 1..18: mol_type = other DNA; mol_type = other DNA
ctctgcatagcaaggagg

SEQ ID NO: 14585 - DNA, 18 bp, synthetic construct
  source 1..18: mol_type = other DNA; mol_type = other DNA
ctctgcacatcaaggagg

SEQ ID NO: 14586 - DNA, 18 bp, synthetic construct
  source 1..18: mol_type = other DNA; mol_type = other DNA
ctctgcacagtaaggagg

SEQ ID NO: 14587 - DNA, 18 bp, synthetic construct
  source 1..18: mol_type = other DNA; mol_type = other DNA
ctctgcacagcaatgagg

SEQ ID NO: 14588 - DNA, 18 bp, synthetic construct
  source 1..18: mol_type = other DNA; mol_type = other DNA
ctctgcacagcaagtagg

SEQ ID NO: 14589 - DNA, 18 bp, synthetic construct
  source 1..18: mol_type = other DNA; mol_type = other DNA
ctctgcacagcaaggatg

SEQ ID NO: 14590 - DNA, 18 bp, synthetic construct
  source 1..18: mol_type = other DNA; mol_type = other DNA
ctctgcacagcaaggagt

SEQ ID NO: 14591 - DNA, 18 bp, synthetic construct
  source 1..18: mol_type = other DNA; mol_type = other DNA
tttctgcacagcaaggag

SEQ ID NO: 14592 - DNA, 18 bp, synthetic construct
  source 1..18: mol_type = other DNA; mol_type = other DNA
tctttgcacagcaaggag

SEQ ID NO: 14593 - DNA, 18 bp, synthetic construct
  source 1..18: mol_type = other DNA; mol_type = other DNA
tctcttcacagcaaggag

SEQ ID NO: 14594 - DNA, 18 bp, synthetic construct
  source 1..18: mol_type = other DNA; mol_type = other DNA
tctctgtacagcaaggag

SEQ ID NO: 14595 - DNA, 18 bp, synthetic construct
  source 1..18: mol_type = other DNA; mol_type = other DNA
tctctgcatagcaaggag

SEQ ID NO: 14596 - DNA, 18 bp, synthetic construct
  source 1..18: mol_type = other DNA; mol_type = other DNA
tctctgcacatcaaggag

SEQ ID NO: 14597 - DNA, 18 bp, synthetic construct
  source 1..18: mol_type = other DNA; mol_type = other DNA
tctctgcacagtaaggag

SEQ ID NO: 14598 - DNA, 18 bp, synthetic construct
  source 1..18: mol_type = other DNA; mol_type = other DNA
tctctgcacagcaatgag

SEQ ID NO: 14599 - DNA, 18 bp, synthetic construct
  source 1..18: mol_type = other DNA; mol_type = other DNA
tctctgcacagcaagtag

SEQ ID NO: 14600 - DNA, 18 bp, synthetic construct
  source 1..18: mol_type = other DNA; mol_type = other DNA
tctctgcacagcaaggat

SEQ ID NO: 14601 - DNA, 18 bp, synthetic construct
  source 1..18: mol_type = other DNA; mol_type = other DNA
ttttctgcacagcaagga

SEQ ID NO: 14602 - DNA, 18 bp, synthetic construct
  source 1..18: mol_type = other DNA; mol_type = other DNA
ttctttgcacagcaagga

SEQ ID NO: 14603 - DNA, 18 bp, synthetic construct
  source 1..18: mol_type = other DNA; mol_type = other DNA
ttctcttcacagcaagga

SEQ ID NO: 14604 - DNA, 18 bp, synthetic construct
  source 1..18: mol_type = other DNA; mol_type = other DNA
ttctctgtacagcaagga

SEQ ID NO: 14605 - DNA, 18 bp, synthetic construct
  source 1..18: mol_type = other DNA; mol_type = other DNA
ttctctgcatagcaagga

SEQ ID NO: 14606 - DNA, 18 bp, synthetic construct
  source 1..18: mol_type = other DNA; mol_type = other DNA
ttctctgcacatcaagga

SEQ ID NO: 14607 - DNA, 18 bp, synthetic construct
  source 1..18: mol_type = other DNA; mol_type = other DNA
ttctctgcacagtaagga

SEQ ID NO: 14608 - DNA, 18 bp, synthetic construct
  source 1..18: mol_type = other DNA; mol_type = other DNA
ttctctgcacagcaatga

SEQ ID NO: 14609 - DNA, 18 bp, synthetic construct
  source 1..18: mol_type = other DNA; mol_type = other DNA
ttctctgcacagcaagta

SEQ ID NO: 14610 - DNA, 18 bp, synthetic construct
  source 1..18: mol_type = other DNA; mol_type = other DNA
attctctgcacagcaagg

SEQ ID NO: 14611 - DNA, 18 bp, synthetic construct
  source 1..18: mol_type = other DNA; mol_type = other DNA
cttatctgcacagcaagg

SEQ ID NO: 14612 - DNA, 18 bp, synthetic construct
  source 1..18: mol_type = other DNA; mol_type = other DNA
cttctatgcacagcaagg

SEQ ID NO: 14613 - DNA, 18 bp, synthetic construct
  source 1..18: mol_type = other DNA; mol_type = other DNA
cttctctacacagcaagg

SEQ ID NO: 14614 - DNA, 18 bp, synthetic construct
  source 1..18: mol_type = other DNA; mol_type = other DNA
cttctctgaacagcaagg

SEQ ID NO: 14615 - DNA, 18 bp, synthetic construct
  source 1..18: mol_type = other DNA; mol_type = other DNA
cttctctgcaaagcaagg

SEQ ID NO: 14616 - DNA, 18 bp, synthetic construct
  source 1..18: mol_type = other DNA; mol_type = other DNA
cttctctgcacaacaagg

SEQ ID NO: 14617 - DNA, 18 bp, synthetic construct
  source 1..18: mol_type = other DNA; mol_type = other DNA
cttctctgcacagaaagg

SEQ ID NO: 14618 - DNA, 18 bp, synthetic construct
  source 1..18: mol_type = other DNA; mol_type = other DNA
cttctctgcacagcaaag

SEQ ID NO: 14619 - DNA, 18 bp, synthetic construct
  source 1..18: mol_type = other DNA; mol_type = other DNA
acttctctgcacagcaag

SEQ ID NO: 14620 - DNA, 18 bp, synthetic construct
  source 1..18: mol_type = other DNA; mol_type = other DNA
gattctctgcacagcaag

SEQ ID NO: 14621 - DNA, 18 bp, synthetic construct
  source 1..18: mol_type = other DNA; mol_type = other DNA
gcttatctgcacagcaag

SEQ ID NO: 14622 - DNA, 18 bp, synthetic construct
  source 1..18: mol_type = other DNA; mol_type = other DNA
gcttctatgcacagcaag

SEQ ID NO: 14623 - DNA, 18 bp, synthetic construct
  source 1..18: mol_type = other DNA; mol_type = other DNA
gcttctctacacagcaag

SEQ ID NO: 14624 - DNA, 18 bp, synthetic construct
  source 1..18: mol_type = other DNA; mol_type = other DNA
gcttctctgaacagcaag

SEQ ID NO: 14625 - DNA, 18 bp, synthetic construct
  source 1..18: mol_type = other DNA; mol_type = other DNA
gcttctctgcaaagcaag

SEQ ID NO: 14626 - DNA, 18 bp, synthetic construct
  source 1..18: mol_type = other DNA; mol_type = other DNA
gcttctctgcacaacaag

SEQ ID NO: 14627 - DNA, 18 bp, synthetic construct
  source 1..18: mol_type = other DNA; mol_type = other DNA
gcttctctgcacagaaag

SEQ ID NO: 14628 - DNA, 18 bp, synthetic construct
  source 1..18: mol_type = other DNA; mol_type = other DNA
atcttctctgcacagcaa

SEQ ID NO: 14629 - DNA, 18 bp, synthetic construct
  source 1..18: mol_type = other DNA; mol_type = other DNA
agtttctctgcacagcaa

SEQ ID NO: 14630 - DNA, 18 bp, synthetic construct
  source 1..18: mol_type = other DNA; mol_type = other DNA
agcttttctgcacagcaa

SEQ ID NO: 14631 - DNA, 18 bp, synthetic construct
  source 1..18: mol_type = other DNA; mol_type = other DNA
agcttctttgcacagcaa

SEQ ID NO: 14632 - DNA, 18 bp, synthetic construct
  source 1..18: mol_type = other DNA; mol_type = other DNA
agcttctcttcacagcaa

SEQ ID NO: 14633 - DNA, 18 bp, synthetic construct
  source 1..18: mol_type = other DNA; mol_type = other DNA
agcttctctgtacagcaa

SEQ ID NO: 14634 - DNA, 18 bp, synthetic construct
  source 1..18: mol_type = other DNA; mol_type = other DNA
agcttctctgcatagcaa

SEQ ID NO: 14635 - DNA, 18 bp, synthetic construct
  source 1..18: mol_type = other DNA; mol_type = other DNA
agcttctctgcacatcaa

SEQ ID NO: 14636 - DNA, 18 bp, synthetic construct
  source 1..18: mol_type = other DNA; mol_type = other DNA
agcttctctgcacagtaa

SEQ ID NO: 14637 - DNA, 18 bp, synthetic construct
  source 1..18: mol_type = other DNA; mol_type = other DNA
aagcttctctgcacagca

SEQ ID NO: 14638 - DNA, 18 bp, synthetic construct
  source 1..18: mol_type = other DNA; mol_type = other DNA
caacttctctgcacagca

SEQ ID NO: 14639 - DNA, 18 bp, synthetic construct
  source 1..18: mol_type = other DNA; mol_type = other DNA
cagattctctgcacagca

SEQ ID NO: 14640 - DNA, 18 bp, synthetic construct
  source 1..18: mol_type = other DNA; mol_type = other DNA
cagcttatctgcacagca

SEQ ID NO: 14641 - DNA, 18 bp, synthetic construct
  source 1..18: mol_type = other DNA; mol_type = other DNA
cagcttctatgcacagca

SEQ ID NO: 14642 - DNA, 18 bp, synthetic construct
  source 1..18: mol_type = other DNA; mol_type = other DNA
cagcttctctacacagca

SEQ ID NO: 14643 - DNA, 18 bp, synthetic construct
  source 1..18: mol_type = other DNA; mol_type = other DNA
cagcttctctgaacagca

SEQ ID NO: 14644 - DNA, 18 bp, synthetic construct
  source 1..18: mol_type = other DNA; mol_type = other DNA
cagcttctctgcaaagca

SEQ ID NO: 14645 - DNA, 18 bp, synthetic construct
  source 1..18: mol_type = other DNA; mol_type = other DNA
cagcttctctgcacagaa

SEQ ID NO: 14646 - DNA, 18 bp, synthetic construct
  source 1..18: mol_type = other DNA; mol_type = other DNA
acagcttctctgcacagc

SEQ ID NO: 14647 - DNA, 18 bp, synthetic construct
  source 1..18: mol_type = other DNA; mol_type = other DNA
caagcttctctgcacagc

SEQ ID NO: 14648 - DNA, 18 bp, synthetic construct
  source 1..18: mol_type = other DNA; mol_type = other DNA
ccaacttctctgcacagc

SEQ ID NO: 14649 - DNA, 18 bp, synthetic construct
  source 1..18: mol_type = other DNA; mol_type = other DNA
ccagattctctgcacagc

SEQ ID NO: 14650 - DNA, 18 bp, synthetic construct
  source 1..18: mol_type = other DNA; mol_type = other DNA
ccagcttatctgcacagc

SEQ ID NO: 14651 - DNA, 18 bp, synthetic construct
  source 1..18: mol_type = other DNA; mol_type = other DNA
ccagcttctatgcacagc

SEQ ID NO: 14652 - DNA, 18 bp, synthetic construct
  source 1..18: mol_type = other DNA; mol_type = other DNA
ccagcttctctacacagc

SEQ ID NO: 14653 - DNA, 18 bp, synthetic construct
  source 1..18: mol_type = other DNA; mol_type = other DNA
ccagcttctctgaacagc

SEQ ID NO: 14654 - DNA, 18 bp, synthetic construct
  source 1..18: mol_type = other DNA; mol_type = other DNA
ccagcttctctgcaaagc

SEQ ID NO: 14655 - DNA, 18 bp, synthetic construct
  source 1..18: mol_type = other DNA; mol_type = other DNA
ccagcttctctgcacaga

SEQ ID NO: 14656 - DNA, 18 bp, synthetic construct
  source 1..18: mol_type = other DNA; mol_type = other DNA
tacagcttctctgcacag

SEQ ID NO: 14657 - DNA, 18 bp, synthetic construct
  source 1..18: mol_type = other DNA; mol_type = other DNA
tcaagcttctctgcacag

SEQ ID NO: 14658 - DNA, 18 bp, synthetic construct
  source 1..18: mol_type = other DNA; mol_type = other DNA
tccaacttctctgcacag

SEQ ID NO: 14659 - DNA, 18 bp, synthetic construct
  source 1..18: mol_type = other DNA; mol_type = other DNA
tccagattctctgcacag

SEQ ID NO: 14660 - DNA, 18 bp, synthetic construct
  source 1..18: mol_type = other DNA; mol_type = other DNA
tccagcttatctgcacag

SEQ ID NO: 14661 - DNA, 18 bp, synthetic construct
  source 1..18: mol_type = other DNA; mol_type = other DNA
tccagcttctatgcacag

SEQ ID NO: 14662 - DNA, 18 bp, synthetic construct
  source 1..18: mol_type = other DNA; mol_type = other DNA
tccagcttctctacacag

SEQ ID NO: 14663 - DNA, 18 bp, synthetic construct
  source 1..18: mol_type = other DNA; mol_type = other DNA
tccagcttctctgaacag

SEQ ID NO: 14664 - DNA, 18 bp, synthetic construct
  source 1..18: mol_type = other DNA; mol_type = other DNA
tccagcttctctgcaaag

SEQ ID NO: 14665 - DNA, 18 bp, synthetic construct
  source 1..18: mol_type = other DNA; mol_type = other DNA
atccagcttctctgcaca

SEQ ID NO: 14666 - DNA, 18 bp, synthetic construct
  source 1..18: mol_type = other DNA; mol_type = other DNA
gtacagcttctctgcaca

SEQ ID NO: 14667 - DNA, 18 bp, synthetic construct
  source 1..18: mol_type = other DNA; mol_type = other DNA
gtcaagcttctctgcaca

SEQ ID NO: 14668 - DNA, 18 bp, synthetic construct
  source 1..18: mol_type = other DNA; mol_type = other DNA
gtccaacttctctgcaca

SEQ ID NO: 14669 - DNA, 18 bp, synthetic construct
  source 1..18: mol_type = other DNA; mol_type = other DNA
gtccagattctctgcaca

SEQ ID NO: 14670 - DNA, 18 bp, synthetic construct
  source 1..18: mol_type = other DNA; mol_type = other DNA
gtccagcttatctgcaca

SEQ ID NO: 14671 - DNA, 18 bp, synthetic construct
  source 1..18: mol_type = other DNA; mol_type = other DNA
gtccagcttctatgcaca

SEQ ID NO: 14672 - DNA, 18 bp, synthetic construct
  source 1..18: mol_type = other DNA; mol_type = other DNA
gtccagcttctctgaaca

SEQ ID NO: 14673 - DNA, 18 bp, synthetic construct
  source 1..18: mol_type = other DNA; mol_type = other DNA
gtccagcttctctgcaaa

SEQ ID NO: 14674 - DNA, 18 bp, synthetic construct
  source 1..18: mol_type = other DNA; mol_type = other DNA
agtccagcttctctgcac

SEQ ID NO: 14675 - DNA, 18 bp, synthetic construct
  source 1..18: mol_type = other DNA; mol_type = other DNA
catccagcttctctgcac

SEQ ID NO: 14676 - DNA, 18 bp, synthetic construct
  source 1..18: mol_type = other DNA; mol_type = other DNA
cgtacagcttctctgcac

SEQ ID NO: 14677 - DNA, 18 bp, synthetic construct
  source 1..18: mol_type = other DNA; mol_type = other DNA
cgtcaagcttctctgcac

SEQ ID NO: 14678 - DNA, 18 bp, synthetic construct
  source 1..18: mol_type = other DNA; mol_type = other DNA
cgtccaacttctctgcac

SEQ ID NO: 14679 - DNA, 18 bp, synthetic construct
  source 1..18: mol_type = other DNA; mol_type = other DNA
cgtccagattctctgcac

SEQ ID NO: 14680 - DNA, 18 bp, synthetic construct
  source 1..18: mol_type = other DNA; mol_type = other DNA
cgtccagcttatctgcac

SEQ ID NO: 14681 - DNA, 18 bp, synthetic construct
  source 1..18: mol_type = other DNA; mol_type = other DNA
cgtccagcttctatgcac

SEQ ID NO: 14682 - DNA, 18 bp, synthetic construct
  source 1..18: mol_type = other DNA; mol_type = other DNA
cgtccagcttctctgaac

SEQ ID NO: 14683 - DNA, 18 bp, synthetic construct
  source 1..18: mol_type = other DNA; mol_type = other DNA
cgtccagcttctctgcaa

SEQ ID NO: 14684 - DNA, 18 bp, synthetic construct
  source 1..18: mol_type = other DNA; mol_type = other DNA
tagtccagcttctctgca

SEQ ID NO: 14685 - DNA, 18 bp, synthetic construct
  source 1..18: mol_type = other DNA; mol_type = other DNA
tcatccagcttctctgca

SEQ ID NO: 14686 - DNA, 18 bp, synthetic construct
  source 1..18: mol_type = other DNA; mol_type = other DNA
tcgtacagcttctctgca

SEQ ID NO: 14687 - DNA, 18 bp, synthetic construct
  source 1..18: mol_type = other DNA; mol_type = other DNA
tcgtcaagcttctctgca

SEQ ID NO: 14688 - DNA, 18 bp, synthetic construct
  source 1..18: mol_type = other DNA; mol_type = other DNA
tcgtccaacttctctgca

SEQ ID NO: 14689 - DNA, 18 bp, synthetic construct
  source 1..18: mol_type = other DNA; mol_type = other DNA
tcgtccagattctctgca

SEQ ID NO: 14690 - DNA, 18 bp, synthetic construct
  source 1..18: mol_type = other DNA; mol_type = other DNA
tcgtccagcttatctgca

SEQ ID NO: 14691 - DNA, 18 bp, synthetic construct
  source 1..18: mol_type = other DNA; mol_type = other DNA
tcgtccagcttctatgca

SEQ ID NO: 14692 - DNA, 18 bp, synthetic construct
  source 1..18: mol_type = other DNA; mol_type = other DNA
tcgtccagcttctctgaa

SEQ ID NO: 14693 - DNA, 18 bp, synthetic construct
  source 1..18: mol_type = other DNA; mol_type = other DNA
atcgtccagcttctctgc

SEQ ID NO: 14694 - DNA, 18 bp, synthetic construct
  source 1..18: mol_type = other DNA; mol_type = other DNA
ctagtccagcttctctgc

SEQ ID NO: 14695 - DNA, 18 bp, synthetic construct
  source 1..18: mol_type = other DNA; mol_type = other DNA
ctcatccagcttctctgc

SEQ ID NO: 14696 - DNA, 18 bp, synthetic construct
  source 1..18: mol_type = other DNA; mol_type = other DNA
ctcgtacagcttctctgc

SEQ ID NO: 14697 - DNA, 18 bp, synthetic construct
  source 1..18: mol_type = other DNA; mol_type = other DNA
ctcgtcaagcttctctgc

SEQ ID NO: 14698 - DNA, 18 bp, synthetic construct
  source 1..18: mol_type = other DNA; mol_type = other DNA
ctcgtccaacttctctgc

SEQ ID NO: 14699 - DNA, 18 bp, synthetic construct
  source 1..18: mol_type = other DNA; mol_type = other DNA
ctcgtccagattctctgc

SEQ ID NO: 14700 - DNA, 18 bp, synthetic construct
  source 1..18: mol_type = other DNA; mol_type = other DNA
ctcgtccagcttatctgc

SEQ ID NO: 14701 - DNA, 18 bp, synthetic construct
  source 1..18: mol_type = other DNA; mol_type = other DNA
ctcgtccagcttctatgc

SEQ ID NO: 14702 - DNA, 18 bp, synthetic construct
  source 1..18: mol_type = other DNA; mol_type = other DNA
ctcgtccagcttctctga

SEQ ID NO: 14703 - DNA, 18 bp, synthetic construct
  source 1..18: mol_type = other DNA; mol_type = other DNA
tatcgtccagcttctctg

SEQ ID NO: 14704 - DNA, 18 bp, synthetic construct
  source 1..18: mol_type = other DNA; mol_type = other DNA
tctagtccagcttctctg

SEQ ID NO: 14705 - DNA, 18 bp, synthetic construct
  source 1..18: mol_type = other DNA; mol_type = other DNA
tctcatccagcttctctg

SEQ ID NO: 14706 - DNA, 18 bp, synthetic construct
  source 1..18: mol_type = other DNA; mol_type = other DNA
tctcgtacagcttctctg

SEQ ID NO: 14707 - DNA, 18 bp, synthetic construct
  source 1..18: mol_type = other DNA; mol_type = other DNA
tctcgtcaagcttctctg

SEQ ID NO: 14708 - DNA, 18 bp, synthetic construct
  source 1..18: mol_type = other DNA; mol_type = other DNA
tctcgtccaacttctctg

SEQ ID NO: 14709 - DNA, 18 bp, synthetic construct
  source 1..18: mol_type = other DNA; mol_type = other DNA
tctcgtccagattctctg

SEQ ID NO: 14710 - DNA, 18 bp, synthetic construct
  source 1..18: mol_type = other DNA; mol_type = other DNA
tctcgtccagcttatctg

SEQ ID NO: 14711 - DNA, 18 bp, synthetic construct
  source 1..18: mol_type = other DNA; mol_type = other DNA
tctcgtccagcttctatg

SEQ ID NO: 14712 - DNA, 18 bp, synthetic construct
  source 1..18: mol_type = other DNA; mol_type = other DNA
atatcgtccagcttctct

SEQ ID NO: 14713 - DNA, 18 bp, synthetic construct
  source 1..18: mol_type = other DNA; mol_type = other DNA
atctagtccagcttctct

SEQ ID NO: 14714 - DNA, 18 bp, synthetic construct
  source 1..18: mol_type = other DNA; mol_type = other DNA
atctcatccagcttctct

SEQ ID NO: 14715 - DNA, 18 bp, synthetic construct
  source 1..18: mol_type = other DNA; mol_type = other DNA
atctcgtacagcttctct

SEQ ID NO: 14716 - DNA, 18 bp, synthetic construct
  source 1..18: mol_type = other DNA; mol_type = other DNA
atctcgtcaagcttctct

SEQ ID NO: 14717 - DNA, 18 bp, synthetic construct
  source 1..18: mol_type = other DNA; mol_type = other DNA
atctcgtccagattctct

SEQ ID NO: 14718 - DNA, 18 bp, synthetic construct
  source 1..18: mol_type = other DNA; mol_type = other DNA
atctcgtccagcttatct

SEQ ID NO: 14719 - DNA, 18 bp, synthetic construct
  source 1..18: mol_type = other DNA; mol_type = other DNA
atctcgtccagcttctat

SEQ ID NO: 14720 - DNA, 18 bp, synthetic construct
  source 1..18: mol_type = other DNA; mol_type = other DNA
aatctcgtccagcttctc

SEQ ID NO: 14721 - DNA, 18 bp, synthetic construct
  source 1..18: mol_type = other DNA; mol_type = other DNA
catatcgtccagcttctc

SEQ ID NO: 14722 - DNA, 18 bp, synthetic construct
  source 1..18: mol_type = other DNA; mol_type = other DNA
catctagtccagcttctc

SEQ ID NO: 14723 - DNA, 18 bp, synthetic construct
  source 1..18: mol_type = other DNA; mol_type = other DNA
catctcatccagcttctc

SEQ ID NO: 14724 - DNA, 18 bp, synthetic construct
  source 1..18: mol_type = other DNA; mol_type = other DNA
catctcgtacagcttctc

SEQ ID NO: 14725 - DNA, 18 bp, synthetic construct
  source 1..18: mol_type = other DNA; mol_type = other DNA
catctcgtcaagcttctc

SEQ ID NO: 14726 - DNA, 18 bp, synthetic construct
  source 1..18: mol_type = other DNA; mol_type = other DNA
catctcgtccagattctc

SEQ ID NO: 14727 - DNA, 18 bp, synthetic construct
  source 1..18: mol_type = other DNA; mol_type = other DNA
catctcgtccagcttatc

SEQ ID NO: 14728 - DNA, 18 bp, synthetic construct
  source 1..18: mol_type = other DNA; mol_type = other DNA
catctcgtccagcttcta

SEQ ID NO: 14729 - DNA, 18 bp, synthetic construct
  source 1..18: mol_type = other DNA; mol_type = other DNA
acatctcgtccagcttct

SEQ ID NO: 14730 - DNA, 18 bp, synthetic construct
  source 1..18: mol_type = other DNA; mol_type = other DNA
gaatctcgtccagcttct

SEQ ID NO: 14731 - DNA, 18 bp, synthetic construct
  source 1..18: mol_type = other DNA; mol_type = other DNA
gcatatcgtccagcttct

SEQ ID NO: 14732 - DNA, 18 bp, synthetic construct
  source 1..18: mol_type = other DNA; mol_type = other DNA
gcatctagtccagcttct

SEQ ID NO: 14733 - DNA, 18 bp, synthetic construct
  source 1..18: mol_type = other DNA; mol_type = other DNA
gcatctcatccagcttct

SEQ ID NO: 14734 - DNA, 18 bp, synthetic construct
  source 1..18: mol_type = other DNA; mol_type = other DNA
gcatctcgtacagcttct

SEQ ID NO: 14735 - DNA, 18 bp, synthetic construct
  source 1..18: mol_type = other DNA; mol_type = other DNA
gcatctcgtcaagcttct

SEQ ID NO: 14736 - DNA, 18 bp, synthetic construct
  source 1..18: mol_type = other DNA; mol_type = other DNA
gcatctcgtccagattct

SEQ ID NO: 14737 - DNA, 18 bp, synthetic construct
  source 1..18: mol_type = other DNA; mol_type = other DNA
gcatctcgtccagcttat

SEQ ID NO: 14738 - DNA, 18 bp, synthetic construct
  source 1..18: mol_type = other DNA; mol_type = other DNA
aacatctcgtccagcttc

SEQ ID NO: 14739 - DNA, 18 bp, synthetic construct
  source 1..18: mol_type = other DNA; mol_type = other DNA
agaatctcgtccagcttc

SEQ ID NO: 14740 - DNA, 18 bp, synthetic construct
  source 1..18: mol_type = other DNA; mol_type = other DNA
agcatatcgtccagcttc

SEQ ID NO: 14741 - DNA, 18 bp, synthetic construct
  source 1..18: mol_type = other DNA; mol_type = other DNA
agcatctagtccagcttc

SEQ ID NO: 14742 - DNA, 18 bp, synthetic construct
  source 1..18: mol_type = other DNA; mol_type = other DNA
agcatctcatccagcttc

SEQ ID NO: 14743 - DNA, 18 bp, synthetic construct
  source 1..18: mol_type = other DNA; mol_type = other DNA
agcatctcgtacagcttc

SEQ ID NO: 14744 - DNA, 18 bp, synthetic construct
  source 1..18: mol_type = other DNA; mol_type = other DNA
agcatctcgtcaagcttc

SEQ ID NO: 14745 - DNA, 18 bp, synthetic construct
  source 1..18: mol_type = other DNA; mol_type = other DNA
agcatctcgtccagattc

SEQ ID NO: 14746 - DNA, 18 bp, synthetic construct
  source 1..18: mol_type = other DNA; mol_type = other DNA
agcatctcgtccagctta

SEQ ID NO: 14747 - DNA, 18 bp, synthetic construct
  source 1..18: mol_type = other DNA; mol_type = other DNA
aagcatctcgtccagctt

SEQ ID NO: 14748 - DNA, 18 bp, synthetic construct
  source 1..18: mol_type = other DNA; mol_type = other DNA
caacatctcgtccagctt

SEQ ID NO: 14749 - DNA, 18 bp, synthetic construct
  source 1..18: mol_type = other DNA; mol_type = other DNA
cagaatctcgtccagctt

SEQ ID NO: 14750 - DNA, 18 bp, synthetic construct
  source 1..18: mol_type = other DNA; mol_type = other DNA
cagcatatcgtccagctt

SEQ ID NO: 14751 - DNA, 18 bp, synthetic construct
  source 1..18: mol_type = other DNA; mol_type = other DNA
cagcatctagtccagctt

SEQ ID NO: 14752 - DNA, 18 bp, synthetic construct
  source 1..18: mol_type = other DNA; mol_type = other DNA
cagcatctcatccagctt

SEQ ID NO: 14753 - DNA, 18 bp, synthetic construct
  source 1..18: mol_type = other DNA; mol_type = other DNA
cagcatctcgtacagctt

SEQ ID NO: 14754 - DNA, 18 bp, synthetic construct
  source 1..18: mol_type = other DNA; mol_type = other DNA
cagcatctcgtcaagctt

SEQ ID NO: 14755 - DNA, 18 bp, synthetic construct
  source 1..18: mol_type = other DNA; mol_type = other DNA
cagcatctcgtccagatt

SEQ ID NO: 14756 - DNA, 18 bp, synthetic construct
  source 1..18: mol_type = other DNA; mol_type = other DNA
acagcatctcgtccagct

SEQ ID NO: 14757 - DNA, 18 bp, synthetic construct
  source 1..18: mol_type = other DNA; mol_type = other DNA
caagcatctcgtccagct

SEQ ID NO: 14758 - DNA, 18 bp, synthetic construct
  source 1..18: mol_type = other DNA; mol_type = other DNA
ccaacatctcgtccagct

SEQ ID NO: 14759 - DNA, 18 bp, synthetic construct
  source 1..18: mol_type = other DNA; mol_type = other DNA
ccagaatctcgtccagct

SEQ ID NO: 14760 - DNA, 18 bp, synthetic construct
  source 1..18: mol_type = other DNA; mol_type = other DNA
ccagcatatcgtccagct

SEQ ID NO: 14761 - DNA, 18 bp, synthetic construct
  source 1..18: mol_type = other DNA; mol_type = other DNA
ccagcatctagtccagct

SEQ ID NO: 14762 - DNA, 18 bp, synthetic construct
  source 1..18: mol_type = other DNA; mol_type = other DNA
ccagcatctcatccagct

SEQ ID NO: 14763 - DNA, 18 bp, synthetic construct
  source 1..18: mol_type = other DNA; mol_type = other DNA
ccagcatctcgtacagct

SEQ ID NO: 14764 - DNA, 18 bp, synthetic construct
  source 1..18: mol_type = other DNA; mol_type = other DNA
ccagcatctcgtcaagct

SEQ ID NO: 14765 - DNA, 18 bp, synthetic construct
  source 1..18: mol_type = other DNA; mol_type = other DNA
ccagcatctcgtccagat

SEQ ID NO: 14766 - DNA, 18 bp, synthetic construct
  source 1..18: mol_type = other DNA; mol_type = other DNA
accagcatctcgtccagc

SEQ ID NO: 14767 - DNA, 18 bp, synthetic construct
  source 1..18: mol_type = other DNA; mol_type = other DNA
gacagcatctcgtccagc

SEQ ID NO: 14768 - DNA, 18 bp, synthetic construct
  source 1..18: mol_type = other DNA; mol_type = other DNA
gcaagcatctcgtccagc

SEQ ID NO: 14769 - DNA, 18 bp, synthetic construct
  source 1..18: mol_type = other DNA; mol_type = other DNA
gccaacatctcgtccagc

SEQ ID NO: 14770 - DNA, 18 bp, synthetic construct
  source 1..18: mol_type = other DNA; mol_type = other DNA
gccagaatctcgtccagc

SEQ ID NO: 14771 - DNA, 18 bp, synthetic construct
  source 1..18: mol_type = other DNA; mol_type = other DNA
gccagcatatcgtccagc

SEQ ID NO: 14772 - DNA, 18 bp, synthetic construct
  source 1..18: mol_type = other DNA; mol_type = other DNA
gccagcatctagtccagc

SEQ ID NO: 14773 - DNA, 18 bp, synthetic construct
  source 1..18: mol_type = other DNA; mol_type = other DNA
gccagcatctcatccagc

SEQ ID NO: 14774 - DNA, 18 bp, synthetic construct
  source 1..18: mol_type = other DNA; mol_type = other DNA
gccagcatctcgtacagc

SEQ ID NO: 14775 - DNA, 18 bp, synthetic construct
  source 1..18: mol_type = other DNA; mol_type = other DNA
gccagcatctcgtcaagc

SEQ ID NO: 14776 - DNA, 18 bp, synthetic construct
  source 1..18: mol_type = other DNA; mol_type = other DNA
gccagcatctcgtccaga

SEQ ID NO: 14777 - DNA, 18 bp, synthetic construct
  source 1..18: mol_type = other DNA; mol_type = other DNA
taccagcatctcgtccag

SEQ ID NO: 14778 - DNA, 18 bp, synthetic construct
  source 1..18: mol_type = other DNA; mol_type = other DNA
tgacagcatctcgtccag

SEQ ID NO: 14779 - DNA, 18 bp, synthetic construct
  source 1..18: mol_type = other DNA; mol_type = other DNA
tgcaagcatctcgtccag

SEQ ID NO: 14780 - DNA, 18 bp, synthetic construct
  source 1..18: mol_type = other DNA; mol_type = other DNA
tgccaacatctcgtccag

SEQ ID NO: 14781 - DNA, 18 bp, synthetic construct
  source 1..18: mol_type = other DNA; mol_type = other DNA
tgccagaatctcgtccag

SEQ ID NO: 14782 - DNA, 18 bp, synthetic construct
  source 1..18: mol_type = other DNA; mol_type = other DNA
tgccagcatatcgtccag

SEQ ID NO: 14783 - DNA, 18 bp, synthetic construct
  source 1..18: mol_type = other DNA; mol_type = other DNA
tgccagcatctagtccag

SEQ ID NO: 14784 - DNA, 18 bp, synthetic construct
  source 1..18: mol_type = other DNA; mol_type = other DNA
tgccagcatctcatccag

SEQ ID NO: 14785 - DNA, 18 bp, synthetic construct
  source 1..18: mol_type = other DNA; mol_type = other DNA
tgccagcatctcgtacag

SEQ ID NO: 14786 - DNA, 18 bp, synthetic construct
  source 1..18: mol_type = other DNA; mol_type = other DNA
tgccagcatctcgtcaag

SEQ ID NO: 14787 - DNA, 18 bp, synthetic construct
  source 1..18: mol_type = other DNA; mol_type = other DNA
atgccagcatctcgtcca

SEQ ID NO: 14788 - DNA, 18 bp, synthetic construct
  source 1..18: mol_type = other DNA; mol_type = other DNA
ctaccagcatctcgtcca

SEQ ID NO: 14789 - DNA, 18 bp, synthetic construct
  source 1..18: mol_type = other DNA; mol_type = other DNA
ctgacagcatctcgtcca

SEQ ID NO: 14790 - DNA, 18 bp, synthetic construct
  source 1..18: mol_type = other DNA; mol_type = other DNA
ctgcaagcatctcgtcca

SEQ ID NO: 14791 - DNA, 18 bp, synthetic construct
  source 1..18: mol_type = other DNA; mol_type = other DNA
ctgccaacatctcgtcca

SEQ ID NO: 14792 - DNA, 18 bp, synthetic construct
  source 1..18: mol_type = other DNA; mol_type = other DNA
ctgccagaatctcgtcca

SEQ ID NO: 14793 - DNA, 18 bp, synthetic construct
  source 1..18: mol_type = other DNA; mol_type = other DNA
ctgccagcatatcgtcca

SEQ ID NO: 14794 - DNA, 18 bp, synthetic construct
  source 1..18: mol_type = other DNA; mol_type = other DNA
ctgccagcatctagtcca

SEQ ID NO: 14795 - DNA, 18 bp, synthetic construct
  source 1..18: mol_type = other DNA; mol_type = other DNA
ctgccagcatctcgtaca

SEQ ID NO: 14796 - DNA, 18 bp, synthetic construct
  source 1..18: mol_type = other DNA; mol_type = other DNA
ctgccagcatctcgtcaa

SEQ ID NO: 14797 - DNA, 18 bp, synthetic construct
  source 1..18: mol_type = other DNA; mol_type = other DNA
actgccagcatctcgtcc

SEQ ID NO: 14798 - DNA, 18 bp, synthetic construct
  source 1..18: mol_type = other DNA; mol_type = other DNA
gatgccagcatctcgtcc

SEQ ID NO: 14799 - DNA, 18 bp, synthetic construct
  source 1..18: mol_type = other DNA; mol_type = other DNA
gctaccagcatctcgtcc

SEQ ID NO: 14800 - DNA, 18 bp, synthetic construct
  source 1..18: mol_type = other DNA; mol_type = other DNA
gctgacagcatctcgtcc

SEQ ID NO: 14801 - DNA, 18 bp, synthetic construct
  source 1..18: mol_type = other DNA; mol_type = other DNA
gctgcaagcatctcgtcc

SEQ ID NO: 14802 - DNA, 18 bp, synthetic construct
  source 1..18: mol_type = other DNA; mol_type = other DNA
gctgccaacatctcgtcc

SEQ ID NO: 14803 - DNA, 18 bp, synthetic construct
  source 1..18: mol_type = other DNA; mol_type = other DNA
gctgccagaatctcgtcc

SEQ ID NO: 14804 - DNA, 18 bp, synthetic construct
  source 1..18: mol_type = other DNA; mol_type = other DNA
gctgccagcatatcgtcc

SEQ ID NO: 14805 - DNA, 18 bp, synthetic construct
  source 1..18: mol_type = other DNA; mol_type = other DNA
gctgccagcatctagtcc

SEQ ID NO: 14806 - DNA, 18 bp, synthetic construct
  source 1..18: mol_type = other DNA; mol_type = other DNA
gctgccagcatctcgtac

SEQ ID NO: 14807 - DNA, 18 bp, synthetic construct
  source 1..18: mol_type = other DNA; mol_type = other DNA
gctgccagcatctcgtca

SEQ ID NO: 14808 - DNA, 18 bp, synthetic construct
  source 1..18: mol_type = other DNA; mol_type = other DNA
agctgccagcatctcgtc

SEQ ID NO: 14809 - DNA, 18 bp, synthetic construct
  source 1..18: mol_type = other DNA; mol_type = other DNA
gactgccagcatctcgtc

SEQ ID NO: 14810 - DNA, 18 bp, synthetic construct
  source 1..18: mol_type = other DNA; mol_type = other DNA
ggatgccagcatctcgtc

SEQ ID NO: 14811 - DNA, 18 bp, synthetic construct
  source 1..18: mol_type = other DNA; mol_type = other DNA
ggctaccagcatctcgtc

SEQ ID NO: 14812 - DNA, 18 bp, synthetic construct
  source 1..18: mol_type = other DNA; mol_type = other DNA
ggctgacagcatctcgtc

SEQ ID NO: 14813 - DNA, 18 bp, synthetic construct
  source 1..18: mol_type = other DNA; mol_type = other DNA
ggctgcaagcatctcgtc

SEQ ID NO: 14814 - DNA, 18 bp, synthetic construct
  source 1..18: mol_type = other DNA; mol_type = other DNA
ggctgccaacatctcgtc

SEQ ID NO: 14815 - DNA, 18 bp, synthetic construct
  source 1..18: mol_type = other DNA; mol_type = other DNA
ggctgccagaatctcgtc

SEQ ID NO: 14816 - DNA, 18 bp, synthetic construct
  source 1..18: mol_type = other DNA; mol_type = other DNA
ggctgccagcatatcgtc

SEQ ID NO: 14817 - DNA, 18 bp, synthetic construct
  source 1..18: mol_type = other DNA; mol_type = other DNA
ggctgccagcatctagtc

SEQ ID NO: 14818 - DNA, 18 bp, synthetic construct
  source 1..18: mol_type = other DNA; mol_type = other DNA
ggctgccagcatctcgta

SEQ ID NO: 14819 - DNA, 18 bp, synthetic construct
  source 1..18: mol_type = other DNA; mol_type = other DNA
aggctgccagcatctcgt

SEQ ID NO: 14820 - DNA, 18 bp, synthetic construct
  source 1..18: mol_type = other DNA; mol_type = other DNA
cagctgccagcatctcgt

SEQ ID NO: 14821 - DNA, 18 bp, synthetic construct
  source 1..18: mol_type = other DNA; mol_type = other DNA
cgactgccagcatctcgt

SEQ ID NO: 14822 - DNA, 18 bp, synthetic construct
  source 1..18: mol_type = other DNA; mol_type = other DNA
cggatgccagcatctcgt

SEQ ID NO: 14823 - DNA, 18 bp, synthetic construct
  source 1..18: mol_type = other DNA; mol_type = other DNA
cggctaccagcatctcgt

SEQ ID NO: 14824 - DNA, 18 bp, synthetic construct
  source 1..18: mol_type = other DNA; mol_type = other DNA
cggctgacagcatctcgt

SEQ ID NO: 14825 - DNA, 18 bp, synthetic construct
  source 1..18: mol_type = other DNA; mol_type = other DNA
cggctgcaagcatctcgt

SEQ ID NO: 14826 - DNA, 18 bp, synthetic construct
  source 1..18: mol_type = other DNA; mol_type = other DNA
cggctgccaacatctcgt

SEQ ID NO: 14827 - DNA, 18 bp, synthetic construct
  source 1..18: mol_type = other DNA; mol_type = other DNA
cggctgccagaatctcgt

SEQ ID NO: 14828 - DNA, 18 bp, synthetic construct
  source 1..18: mol_type = other DNA; mol_type = other DNA
cggctgccagcatatcgt

SEQ ID NO: 14829 - DNA, 18 bp, synthetic construct
  source 1..18: mol_type = other DNA; mol_type = other DNA
cggctgccagcatctagt

SEQ ID NO: 14830 - DNA, 18 bp, synthetic construct
  source 1..18: mol_type = other DNA; mol_type = other DNA
acggctgccagcatctcg

SEQ ID NO: 14831 - DNA, 18 bp, synthetic construct
  source 1..18: mol_type = other DNA; mol_type = other DNA
gaggctgccagcatctcg

SEQ ID NO: 14832 - DNA, 18 bp, synthetic construct
  source 1..18: mol_type = other DNA; mol_type = other DNA
gcagctgccagcatctcg

SEQ ID NO: 14833 - DNA, 18 bp, synthetic construct
  source 1..18: mol_type = other DNA; mol_type = other DNA
gcgactgccagcatctcg

SEQ ID NO: 14834 - DNA, 18 bp, synthetic construct
  source 1..18: mol_type = other DNA; mol_type = other DNA
gcggatgccagcatctcg

SEQ ID NO: 14835 - DNA, 18 bp, synthetic construct
  source 1..18: mol_type = other DNA; mol_type = other DNA
gcggctaccagcatctcg

SEQ ID NO: 14836 - DNA, 18 bp, synthetic construct
  source 1..18: mol_type = other DNA; mol_type = other DNA
gcggctgacagcatctcg

SEQ ID NO: 14837 - DNA, 18 bp, synthetic construct
  source 1..18: mol_type = other DNA; mol_type = other DNA
gcggctgcaagcatctcg

SEQ ID NO: 14838 - DNA, 18 bp, synthetic construct
  source 1..18: mol_type = other DNA; mol_type = other DNA
gcggctgccaacatctcg

SEQ ID NO: 14839 - DNA, 18 bp, synthetic construct
  source 1..18: mol_type = other DNA; mol_type = other DNA
gcggctgccagaatctcg

SEQ ID NO: 14840 - DNA, 18 bp, synthetic construct
  source 1..18: mol_type = other DNA; mol_type = other DNA
gcggctgccagcatatcg

SEQ ID NO: 14841 - DNA, 18 bp, synthetic construct
  source 1..18: mol_type = other DNA; mol_type = other DNA
gcggctgccagcatctag

SEQ ID NO: 14842 - DNA, 18 bp, synthetic construct
  source 1..18: mol_type = other DNA; mol_type = other DNA
agcggctgccagcatctc

SEQ ID NO: 14843 - DNA, 18 bp, synthetic construct
  source 1..18: mol_type = other DNA; mol_type = other DNA
gacggctgccagcatctc

SEQ ID NO: 14844 - DNA, 18 bp, synthetic construct
  source 1..18: mol_type = other DNA; mol_type = other DNA
ggaggctgccagcatctc

SEQ ID NO: 14845 - DNA, 18 bp, synthetic construct
  source 1..18: mol_type = other DNA; mol_type = other DNA
ggcagctgccagcatctc

SEQ ID NO: 14846 - DNA, 18 bp, synthetic construct
  source 1..18: mol_type = other DNA; mol_type = other DNA
ggcgactgccagcatctc

SEQ ID NO: 14847 - DNA, 18 bp, synthetic construct
  source 1..18: mol_type = other DNA; mol_type = other DNA
ggcggatgccagcatctc

SEQ ID NO: 14848 - DNA, 18 bp, synthetic construct
  source 1..18: mol_type = other DNA; mol_type = other DNA
ggcggctaccagcatctc

SEQ ID NO: 14849 - DNA, 18 bp, synthetic construct
  source 1..18: mol_type = other DNA; mol_type = other DNA
ggcggctgacagcatctc

SEQ ID NO: 14850 - DNA, 18 bp, synthetic construct
  source 1..18: mol_type = other DNA; mol_type = other DNA
ggcggctgcaagcatctc

SEQ ID NO: 14851 - DNA, 18 bp, synthetic construct
  source 1..18: mol_type = other DNA; mol_type = other DNA
ggcggctgccagaatctc

SEQ ID NO: 14852 - DNA, 18 bp, synthetic construct
  source 1..18: mol_type = other DNA; mol_type = other DNA
ggcggctgccagcatatc

SEQ ID NO: 14853 - DNA, 18 bp, synthetic construct
  source 1..18: mol_type = other DNA; mol_type = other DNA
ggcggctgccagcatcta

SEQ ID NO: 14854 - DNA, 18 bp, synthetic construct
  source 1..18: mol_type = other DNA; mol_type = other DNA
aggcggctgccagcatct

SEQ ID NO: 14855 - DNA, 18 bp, synthetic construct
  source 1..18: mol_type = other DNA; mol_type = other DNA
cagcggctgccagcatct

SEQ ID NO: 14856 - DNA, 18 bp, synthetic construct
  source 1..18: mol_type = other DNA; mol_type = other DNA
cgacggctgccagcatct

SEQ ID NO: 14857 - DNA, 18 bp, synthetic construct
  source 1..18: mol_type = other DNA; mol_type = other DNA
cggaggctgccagcatct

SEQ ID NO: 14858 - DNA, 18 bp, synthetic construct
  source 1..18: mol_type = other DNA; mol_type = other DNA
cggcagctgccagcatct

SEQ ID NO: 14859 - DNA, 18 bp, synthetic construct
  source 1..18: mol_type = other DNA; mol_type = other DNA
cggcgactgccagcatct

SEQ ID NO: 14860 - DNA, 18 bp, synthetic construct
  source 1..18: mol_type = other DNA; mol_type = other DNA
cggcggatgccagcatct

SEQ ID NO: 14861 - DNA, 18 bp, synthetic construct
  source 1..18: mol_type = other DNA; mol_type = other DNA
cggcggctaccagcatct

SEQ ID NO: 14862 - DNA, 18 bp, synthetic construct
  source 1..18: mol_type = other DNA; mol_type = other DNA
cggcggctgacagcatct

SEQ ID NO: 14863 - DNA, 18 bp, synthetic construct
  source 1..18: mol_type = other DNA; mol_type = other DNA
cggcggctgcaagcatct

SEQ ID NO: 14864 - DNA, 18 bp, synthetic construct
  source 1..18: mol_type = other DNA; mol_type = other DNA
cggcggctgccagaatct

SEQ ID NO: 14865 - DNA, 18 bp, synthetic construct
  source 1..18: mol_type = other DNA; mol_type = other DNA
cggcggctgccagcatat

SEQ ID NO: 14866 - DNA, 18 bp, synthetic construct
  source 1..18: mol_type = other DNA; mol_type = other DNA
acggcggctgccagcatc

SEQ ID NO: 14867 - DNA, 18 bp, synthetic construct
  source 1..18: mol_type = other DNA; mol_type = other DNA
gaggcggctgccagcatc

SEQ ID NO: 14868 - DNA, 18 bp, synthetic construct
  source 1..18: mol_type = other DNA; mol_type = other DNA
gcagcggctgccagcatc

SEQ ID NO: 14869 - DNA, 18 bp, synthetic construct
  source 1..18: mol_type = other DNA; mol_type = other DNA
gcgacggctgccagcatc

SEQ ID NO: 14870 - DNA, 18 bp, synthetic construct
  source 1..18: mol_type = other DNA; mol_type = other DNA
gcggaggctgccagcatc

SEQ ID NO: 14871 - DNA, 18 bp, synthetic construct
  source 1..18: mol_type = other DNA; mol_type = other DNA
gcggcagctgccagcatc

SEQ ID NO: 14872 - DNA, 18 bp, synthetic construct
  source 1..18: mol_type = other DNA; mol_type = other DNA
gcggcgactgccagcatc

SEQ ID NO: 14873 - DNA, 18 bp, synthetic construct
  source 1..18: mol_type = other DNA; mol_type = other DNA
gcggcggatgccagcatc

SEQ ID NO: 14874 - DNA, 18 bp, synthetic construct
  source 1..18: mol_type = other DNA; mol_type = other DNA
gcggcggctaccagcatc

SEQ ID NO: 14875 - DNA, 18 bp, synthetic construct
  source 1..18: mol_type = other DNA; mol_type = other DNA
gcggcggctgacagcatc

SEQ ID NO: 14876 - DNA, 18 bp, synthetic construct
  source 1..18: mol_type = other DNA; mol_type = other DNA
gcggcggctgcaagcatc

SEQ ID NO: 14877 - DNA, 18 bp, synthetic construct
  source 1..18: mol_type = other DNA; mol_type = other DNA
gcggcggctgccagaatc

SEQ ID NO: 14878 - DNA, 18 bp, synthetic construct
  source 1..18: mol_type = other DNA; mol_type = other DNA
gcggcggctgccagcata

SEQ ID NO: 14879 - DNA, 18 bp, synthetic construct
  source 1..18: mol_type = other DNA; mol_type = other DNA
tacggcggctgccagcat

SEQ ID NO: 14880 - DNA, 18 bp, synthetic construct
  source 1..18: mol_type = other DNA; mol_type = other DNA
tgaggcggctgccagcat

SEQ ID NO: 14881 - DNA, 18 bp, synthetic construct
  source 1..18: mol_type = other DNA; mol_type = other DNA
tgcagcggctgccagcat

SEQ ID NO: 14882 - DNA, 18 bp, synthetic construct
  source 1..18: mol_type = other DNA; mol_type = other DNA
tgcgacggctgccagcat

SEQ ID NO: 14883 - DNA, 18 bp, synthetic construct
  source 1..18: mol_type = other DNA; mol_type = other DNA
tgcggaggctgccagcat

SEQ ID NO: 14884 - DNA, 18 bp, synthetic construct
  source 1..18: mol_type = other DNA; mol_type = other DNA
tgcggcagctgccagcat

SEQ ID NO: 14885 - DNA, 18 bp, synthetic construct
  source 1..18: mol_type = other DNA; mol_type = other DNA
tgcggcgactgccagcat

SEQ ID NO: 14886 - DNA, 18 bp, synthetic construct
  source 1..18: mol_type = other DNA; mol_type = other DNA
tgcggcggatgccagcat

SEQ ID NO: 14887 - DNA, 18 bp, synthetic construct
  source 1..18: mol_type = other DNA; mol_type = other DNA
tgcggcggctaccagcat

SEQ ID NO: 14888 - DNA, 18 bp, synthetic construct
  source 1..18: mol_type = other DNA; mol_type = other DNA
tgcggcggctgacagcat

SEQ ID NO: 14889 - DNA, 18 bp, synthetic construct
  source 1..18: mol_type = other DNA; mol_type = other DNA
tgcggcggctgcaagcat

SEQ ID NO: 14890 - DNA, 18 bp, synthetic construct
  source 1..18: mol_type = other DNA; mol_type = other DNA
tgcggcggctgccagaat

SEQ ID NO: 14891 - DNA, 18 bp, synthetic construct
  source 1..18: mol_type = other DNA; mol_type = other DNA
atgcggcggctgccagca

SEQ ID NO: 14892 - DNA, 18 bp, synthetic construct
  source 1..18: mol_type = other DNA; mol_type = other DNA
ctacggcggctgccagca

SEQ ID NO: 14893 - DNA, 18 bp, synthetic construct
  source 1..18: mol_type = other DNA; mol_type = other DNA
ctgaggcggctgccagca

SEQ ID NO: 14894 - DNA, 18 bp, synthetic construct
  source 1..18: mol_type = other DNA; mol_type = other DNA
ctgcagcggctgccagca

SEQ ID NO: 14895 - DNA, 18 bp, synthetic construct
  source 1..18: mol_type = other DNA; mol_type = other DNA
ctgcgacggctgccagca

SEQ ID NO: 14896 - DNA, 18 bp, synthetic construct
  source 1..18: mol_type = other DNA; mol_type = other DNA
ctgcggaggctgccagca

SEQ ID NO: 14897 - DNA, 18 bp, synthetic construct
  source 1..18: mol_type = other DNA; mol_type = other DNA
ctgcggcagctgccagca

SEQ ID NO: 14898 - DNA, 18 bp, synthetic construct
  source 1..18: mol_type = other DNA; mol_type = other DNA
ctgcggcgactgccagca

SEQ ID NO: 14899 - DNA, 18 bp, synthetic construct
  source 1..18: mol_type = other DNA; mol_type = other DNA
ctgcggcggatgccagca

SEQ ID NO: 14900 - DNA, 18 bp, synthetic construct
  source 1..18: mol_type = other DNA; mol_type = other DNA
ctgcggcggctaccagca

SEQ ID NO: 14901 - DNA, 18 bp, synthetic construct
  source 1..18: mol_type = other DNA; mol_type = other DNA
ctgcggcggctgacagca

SEQ ID NO: 14902 - DNA, 18 bp, synthetic construct
  source 1..18: mol_type = other DNA; mol_type = other DNA
ctgcggcggctgcaagca

SEQ ID NO: 14903 - DNA, 18 bp, synthetic construct
  source 1..18: mol_type = other DNA; mol_type = other DNA
ctgcggcggctgccagaa

SEQ ID NO: 14904 - DNA, 18 bp, synthetic construct
  source 1..18: mol_type = other DNA; mol_type = other DNA
tatgcggcggctgccagc

SEQ ID NO: 14905 - DNA, 18 bp, synthetic construct
  source 1..18: mol_type = other DNA; mol_type = other DNA
tctacggcggctgccagc

SEQ ID NO: 14906 - DNA, 18 bp, synthetic construct
  source 1..18: mol_type = other DNA; mol_type = other DNA
tctgaggcggctgccagc

SEQ ID NO: 14907 - DNA, 18 bp, synthetic construct
  source 1..18: mol_type = other DNA; mol_type = other DNA
tctgcagcggctgccagc

SEQ ID NO: 14908 - DNA, 18 bp, synthetic construct
  source 1..18: mol_type = other DNA; mol_type = other DNA
tctgcgacggctgccagc

SEQ ID NO: 14909 - DNA, 18 bp, synthetic construct
  source 1..18: mol_type = other DNA; mol_type = other DNA
tctgcggaggctgccagc

SEQ ID NO: 14910 - DNA, 18 bp, synthetic construct
  source 1..18: mol_type = other DNA; mol_type = other DNA
tctgcggcagctgccagc

SEQ ID NO: 14911 - DNA, 18 bp, synthetic construct
  source 1..18: mol_type = other DNA; mol_type = other DNA
tctgcggcgactgccagc

SEQ ID NO: 14912 - DNA, 18 bp, synthetic construct
  source 1..18: mol_type = other DNA; mol_type = other DNA
tctgcggcggatgccagc

SEQ ID NO: 14913 - DNA, 18 bp, synthetic construct
  source 1..18: mol_type = other DNA; mol_type = other DNA
tctgcggcggctaccagc

SEQ ID NO: 14914 - DNA, 18 bp, synthetic construct
  source 1..18: mol_type = other DNA; mol_type = other DNA
tctgcggcggctgacagc

SEQ ID NO: 14915 - DNA, 18 bp, synthetic construct
  source 1..18: mol_type = other DNA; mol_type = other DNA
tctgcggcggctgcaagc

SEQ ID NO: 14916 - DNA, 18 bp, synthetic construct
  source 1..18: mol_type = other DNA; mol_type = other DNA
tctgcggcggctgccaga

SEQ ID NO: 14917 - DNA, 18 bp, synthetic construct
  source 1..18: mol_type = other DNA; mol_type = other DNA
atctgcggcggctgccag

SEQ ID NO: 14918 - DNA, 18 bp, synthetic construct
  source 1..18: mol_type = other DNA; mol_type = other DNA
ctatgcggcggctgccag

SEQ ID NO: 14919 - DNA, 18 bp, synthetic construct
  source 1..18: mol_type = other DNA; mol_type = other DNA
ctctacggcggctgccag

SEQ ID NO: 14920 - DNA, 18 bp, synthetic construct
  source 1..18: mol_type = other DNA; mol_type = other DNA
ctctgaggcggctgccag

SEQ ID NO: 14921 - DNA, 18 bp, synthetic construct
  source 1..18: mol_type = other DNA; mol_type = other DNA
ctctgcagcggctgccag

SEQ ID NO: 14922 - DNA, 18 bp, synthetic construct
  source 1..18: mol_type = other DNA; mol_type = other DNA
ctctgcgacggctgccag

SEQ ID NO: 14923 - DNA, 18 bp, synthetic construct
  source 1..18: mol_type = other DNA; mol_type = other DNA
ctctgcggaggctgccag

SEQ ID NO: 14924 - DNA, 18 bp, synthetic construct
  source 1..18: mol_type = other DNA; mol_type = other DNA
ctctgcggcagctgccag

SEQ ID NO: 14925 - DNA, 18 bp, synthetic construct
  source 1..18: mol_type = other DNA; mol_type = other DNA
ctctgcggcgactgccag

SEQ ID NO: 14926 - DNA, 18 bp, synthetic construct
  source 1..18: mol_type = other DNA; mol_type = other DNA
ctctgcggcggatgccag

SEQ ID NO: 14927 - DNA, 18 bp, synthetic construct
  source 1..18: mol_type = other DNA; mol_type = other DNA
ctctgcggcggctaccag

SEQ ID NO: 14928 - DNA, 18 bp, synthetic construct
  source 1..18: mol_type = other DNA; mol_type = other DNA
ctctgcggcggctgacag

SEQ ID NO: 14929 - DNA, 18 bp, synthetic construct
  source 1..18: mol_type = other DNA; mol_type = other DNA
ctctgcggcggctgcaag

SEQ ID NO: 14930 - DNA, 18 bp, synthetic construct
  source 1..18: mol_type = other DNA; mol_type = other DNA
actctgcggcggctgcca

SEQ ID NO: 14931 - DNA, 18 bp, synthetic construct
  source 1..18: mol_type = other DNA; mol_type = other DNA
gatctgcggcggctgcca

SEQ ID NO: 14932 - DNA, 18 bp, synthetic construct
  source 1..18: mol_type = other DNA; mol_type = other DNA
gctatgcggcggctgcca

SEQ ID NO: 14933 - DNA, 18 bp, synthetic construct
  source 1..18: mol_type = other DNA; mol_type = other DNA
gctctacggcggctgcca

SEQ ID NO: 14934 - DNA, 18 bp, synthetic construct
  source 1..18: mol_type = other DNA; mol_type = other DNA
gctctgaggcggctgcca

SEQ ID NO: 14935 - DNA, 18 bp, synthetic construct
  source 1..18: mol_type = other DNA; mol_type = other DNA
gctctgcagcggctgcca

SEQ ID NO: 14936 - DNA, 18 bp, synthetic construct
  source 1..18: mol_type = other DNA; mol_type = other DNA
gctctgcgacggctgcca

SEQ ID NO: 14937 - DNA, 18 bp, synthetic construct
  source 1..18: mol_type = other DNA; mol_type = other DNA
gctctgcggaggctgcca

SEQ ID NO: 14938 - DNA, 18 bp, synthetic construct
  source 1..18: mol_type = other DNA; mol_type = other DNA
gctctgcggcagctgcca

SEQ ID NO: 14939 - DNA, 18 bp, synthetic construct
  source 1..18: mol_type = other DNA; mol_type = other DNA
gctctgcggcgactgcca

SEQ ID NO: 14940 - DNA, 18 bp, synthetic construct
  source 1..18: mol_type = other DNA; mol_type = other DNA
gctctgcggcggatgcca

SEQ ID NO: 14941 - DNA, 18 bp, synthetic construct
  source 1..18: mol_type = other DNA; mol_type = other DNA
gctctgcggcggctgaca

SEQ ID NO: 14942 - DNA, 18 bp, synthetic construct
  source 1..18: mol_type = other DNA; mol_type = other DNA
gctctgcggcggctgcaa

SEQ ID NO: 14943 - DNA, 18 bp, synthetic construct
  source 1..18: mol_type = other DNA; mol_type = other DNA
agctctgcggcggctgcc

SEQ ID NO: 14944 - DNA, 18 bp, synthetic construct
  source 1..18: mol_type = other DNA; mol_type = other DNA
gactctgcggcggctgcc

SEQ ID NO: 14945 - DNA, 18 bp, synthetic construct
  source 1..18: mol_type = other DNA; mol_type = other DNA
ggatctgcggcggctgcc

SEQ ID NO: 14946 - DNA, 18 bp, synthetic construct
  source 1..18: mol_type = other DNA; mol_type = other DNA
ggctatgcggcggctgcc

SEQ ID NO: 14947 - DNA, 18 bp, synthetic construct
  source 1..18: mol_type = other DNA; mol_type = other DNA
ggctctacggcggctgcc

SEQ ID NO: 14948 - DNA, 18 bp, synthetic construct
  source 1..18: mol_type = other DNA; mol_type = other DNA
ggctctgaggcggctgcc

SEQ ID NO: 14949 - DNA, 18 bp, synthetic construct
  source 1..18: mol_type = other DNA; mol_type = other DNA
ggctctgcagcggctgcc

SEQ ID NO: 14950 - DNA, 18 bp, synthetic construct
  source 1..18: mol_type = other DNA; mol_type = other DNA
ggctctgcgacggctgcc

SEQ ID NO: 14951 - DNA, 18 bp, synthetic construct
  source 1..18: mol_type = other DNA; mol_type = other DNA
ggctctgcggaggctgcc

SEQ ID NO: 14952 - DNA, 18 bp, synthetic construct
  source 1..18: mol_type = other DNA; mol_type = other DNA
ggctctgcggcagctgcc

SEQ ID NO: 14953 - DNA, 18 bp, synthetic construct
  source 1..18: mol_type = other DNA; mol_type = other DNA
ggctctgcggcgactgcc

SEQ ID NO: 14954 - DNA, 18 bp, synthetic construct
  source 1..18: mol_type = other DNA; mol_type = other DNA
ggctctgcggcggatgcc

SEQ ID NO: 14955 - DNA, 18 bp, synthetic construct
  source 1..18: mol_type = other DNA; mol_type = other DNA
ggctctgcggcggctgac

SEQ ID NO: 14956 - DNA, 18 bp, synthetic construct
  source 1..18: mol_type = other DNA; mol_type = other DNA
ggctctgcggcggctgca

SEQ ID NO: 14957 - DNA, 18 bp, synthetic construct
  source 1..18: mol_type = other DNA; mol_type = other DNA
tagctctgcggcggctgc

SEQ ID NO: 14958 - DNA, 18 bp, synthetic construct
  source 1..18: mol_type = other DNA; mol_type = other DNA
tgactctgcggcggctgc

SEQ ID NO: 14959 - DNA, 18 bp, synthetic construct
  source 1..18: mol_type = other DNA; mol_type = other DNA
tggatctgcggcggctgc

SEQ ID NO: 14960 - DNA, 18 bp, synthetic construct
  source 1..18: mol_type = other DNA; mol_type = other DNA
tggctatgcggcggctgc

SEQ ID NO: 14961 - DNA, 18 bp, synthetic construct
  source 1..18: mol_type = other DNA; mol_type = other DNA
tggctctacggcggctgc

SEQ ID NO: 14962 - DNA, 18 bp, synthetic construct
  source 1..18: mol_type = other DNA; mol_type = other DNA
tggctctgaggcggctgc

SEQ ID NO: 14963 - DNA, 18 bp, synthetic construct
  source 1..18: mol_type = other DNA; mol_type = other DNA
tggctctgcagcggctgc

SEQ ID NO: 14964 - DNA, 18 bp, synthetic construct
  source 1..18: mol_type = other DNA; mol_type = other DNA
tggctctgcgacggctgc

SEQ ID NO: 14965 - DNA, 18 bp, synthetic construct
  source 1..18: mol_type = other DNA; mol_type = other DNA
tggctctgcggaggctgc

SEQ ID NO: 14966 - DNA, 18 bp, synthetic construct
  source 1..18: mol_type = other DNA; mol_type = other DNA
tggctctgcggcagctgc

SEQ ID NO: 14967 - DNA, 18 bp, synthetic construct
  source 1..18: mol_type = other DNA; mol_type = other DNA
tggctctgcggcgactgc

SEQ ID NO: 14968 - DNA, 18 bp, synthetic construct
  source 1..18: mol_type = other DNA; mol_type = other DNA
tggctctgcggcggatgc

SEQ ID NO: 14969 - DNA, 18 bp, synthetic construct
  source 1..18: mol_type = other DNA; mol_type = other DNA
tggctctgcggcggctga

SEQ ID NO: 14970 - DNA, 18 bp, synthetic construct
  source 1..18: mol_type = other DNA; mol_type = other DNA
ttagctctgcggcggctg

SEQ ID NO: 14971 - DNA, 18 bp, synthetic construct
  source 1..18: mol_type = other DNA; mol_type = other DNA
ttgactctgcggcggctg

SEQ ID NO: 14972 - DNA, 18 bp, synthetic construct
  source 1..18: mol_type = other DNA; mol_type = other DNA
ttggatctgcggcggctg

SEQ ID NO: 14973 - DNA, 18 bp, synthetic construct
  source 1..18: mol_type = other DNA; mol_type = other DNA
ttggctatgcggcggctg

SEQ ID NO: 14974 - DNA, 18 bp, synthetic construct
  source 1..18: mol_type = other DNA; mol_type = other DNA
ttggctctacggcggctg

SEQ ID NO: 14975 - DNA, 18 bp, synthetic construct
  source 1..18: mol_type = other DNA; mol_type = other DNA
ttggctctgaggcggctg

SEQ ID NO: 14976 - DNA, 18 bp, synthetic construct
  source 1..18: mol_type = other DNA; mol_type = other DNA
ttggctctgcagcggctg

SEQ ID NO: 14977 - DNA, 18 bp, synthetic construct
  source 1..18: mol_type = other DNA; mol_type = other DNA
ttggctctgcgacggctg

SEQ ID NO: 14978 - DNA, 18 bp, synthetic construct
  source 1..18: mol_type = other DNA; mol_type = other DNA
ttggctctgcggaggctg

SEQ ID NO: 14979 - DNA, 18 bp, synthetic construct
  source 1..18: mol_type = other DNA; mol_type = other DNA
ttggctctgcggcagctg

SEQ ID NO: 14980 - DNA, 18 bp, synthetic construct
  source 1..18: mol_type = other DNA; mol_type = other DNA
ttggctctgcggcgactg

SEQ ID NO: 14981 - DNA, 18 bp, synthetic construct
  source 1..18: mol_type = other DNA; mol_type = other DNA
ttggctctgcggcggatg

SEQ ID NO: 14982 - DNA, 18 bp, synthetic construct
  source 1..18: mol_type = other DNA; mol_type = other DNA
attggctctgcggcggct

SEQ ID NO: 14983 - DNA, 18 bp, synthetic construct
  source 1..18: mol_type = other DNA; mol_type = other DNA
gttagctctgcggcggct

SEQ ID NO: 14984 - DNA, 18 bp, synthetic construct
  source 1..18: mol_type = other DNA; mol_type = other DNA
gttgactctgcggcggct

SEQ ID NO: 14985 - DNA, 18 bp, synthetic construct
  source 1..18: mol_type = other DNA; mol_type = other DNA
gttggatctgcggcggct

SEQ ID NO: 14986 - DNA, 18 bp, synthetic construct
  source 1..18: mol_type = other DNA; mol_type = other DNA
gttggctatgcggcggct

SEQ ID NO: 14987 - DNA, 18 bp, synthetic construct
  source 1..18: mol_type = other DNA; mol_type = other DNA
gttggctctacggcggct

SEQ ID NO: 14988 - DNA, 18 bp, synthetic construct
  source 1..18: mol_type = other DNA; mol_type = other DNA
gttggctctgaggcggct

SEQ ID NO: 14989 - DNA, 18 bp, synthetic construct
  source 1..18: mol_type = other DNA; mol_type = other DNA
gttggctctgcagcggct

SEQ ID NO: 14990 - DNA, 18 bp, synthetic construct
  source 1..18: mol_type = other DNA; mol_type = other DNA
gttggctctgcgacggct

SEQ ID NO: 14991 - DNA, 18 bp, synthetic construct
  source 1..18: mol_type = other DNA; mol_type = other DNA
gttggctctgcggaggct

SEQ ID NO: 14992 - DNA, 18 bp, synthetic construct
  source 1..18: mol_type = other DNA; mol_type = other DNA
gttggctctgcggcagct

SEQ ID NO: 14993 - DNA, 18 bp, synthetic construct
  source 1..18: mol_type = other DNA; mol_type = other DNA
gttggctctgcggcggat

SEQ ID NO: 14994 - DNA, 18 bp, synthetic construct
  source 1..18: mol_type = other DNA; mol_type = other DNA
agttggctctgcggcggc

SEQ ID NO: 14995 - DNA, 18 bp, synthetic construct
  source 1..18: mol_type = other DNA; mol_type = other DNA
cattggctctgcggcggc

SEQ ID NO: 14996 - DNA, 18 bp, synthetic construct
  source 1..18: mol_type = other DNA; mol_type = other DNA
cgttagctctgcggcggc

SEQ ID NO: 14997 - DNA, 18 bp, synthetic construct
  source 1..18: mol_type = other DNA; mol_type = other DNA
cgttgactctgcggcggc

SEQ ID NO: 14998 - DNA, 18 bp, synthetic construct
  source 1..18: mol_type = other DNA; mol_type = other DNA
cgttggatctgcggcggc

SEQ ID NO: 14999 - DNA, 18 bp, synthetic construct
  source 1..18: mol_type = other DNA; mol_type = other DNA
cgttggctatgcggcggc

SEQ ID NO: 15000 - DNA, 18 bp, synthetic construct
  source 1..18: mol_type = other DNA; mol_type = other DNA
cgttggctctacggcggc

SEQ ID NO: 15001 - DNA, 18 bp, synthetic construct
  source 1..18: mol_type = other DNA; mol_type = other DNA
cgttggctctgaggcggc

SEQ ID NO: 15002 - DNA, 18 bp, synthetic construct
  source 1..18: mol_type = other DNA; mol_type = other DNA
cgttggctctgcagcggc

SEQ ID NO: 15003 - DNA, 18 bp, synthetic construct
  source 1..18: mol_type = other DNA; mol_type = other DNA
cgttggctctgcgacggc

SEQ ID NO: 15004 - DNA, 18 bp, synthetic construct
  source 1..18: mol_type = other DNA; mol_type = other DNA
cgttggctctgcggaggc

SEQ ID NO: 15005 - DNA, 18 bp, synthetic construct
  source 1..18: mol_type = other DNA; mol_type = other DNA
cgttggctctgcggcagc

SEQ ID NO: 15006 - DNA, 18 bp, synthetic construct
  source 1..18: mol_type = other DNA; mol_type = other DNA
cgttggctctgcggcgga

SEQ ID NO: 15007 - DNA, 18 bp, synthetic construct
  source 1..18: mol_type = other DNA; mol_type = other DNA
acgttggctctgcggcgg

SEQ ID NO: 15008 - DNA, 18 bp, synthetic construct
  source 1..18: mol_type = other DNA; mol_type = other DNA
gagttggctctgcggcgg

SEQ ID NO: 15009 - DNA, 18 bp, synthetic construct
  source 1..18: mol_type = other DNA; mol_type = other DNA
gcattggctctgcggcgg

SEQ ID NO: 15010 - DNA, 18 bp, synthetic construct
  source 1..18: mol_type = other DNA; mol_type = other DNA
gcgttagctctgcggcgg

SEQ ID NO: 15011 - DNA, 18 bp, synthetic construct
  source 1..18: mol_type = other DNA; mol_type = other DNA
gcgttgactctgcggcgg

SEQ ID NO: 15012 - DNA, 18 bp, synthetic construct
  source 1..18: mol_type = other DNA; mol_type = other DNA
gcgttggatctgcggcgg

SEQ ID NO: 15013 - DNA, 18 bp, synthetic construct
  source 1..18: mol_type = other DNA; mol_type = other DNA
gcgttggctatgcggcgg

SEQ ID NO: 15014 - DNA, 18 bp, synthetic construct
  source 1..18: mol_type = other DNA; mol_type = other DNA
gcgttggctctacggcgg

SEQ ID NO: 15015 - DNA, 18 bp, synthetic construct
  source 1..18: mol_type = other DNA; mol_type = other DNA
gcgttggctctgaggcgg

SEQ ID NO: 15016 - DNA, 18 bp, synthetic construct
  source 1..18: mol_type = other DNA; mol_type = other DNA
gcgttggctctgcagcgg

SEQ ID NO: 15017 - DNA, 18 bp, synthetic construct
  source 1..18: mol_type = other DNA; mol_type = other DNA
gcgttggctctgcgacgg

SEQ ID NO: 15018 - DNA, 18 bp, synthetic construct
  source 1..18: mol_type = other DNA; mol_type = other DNA
gcgttggctctgcggagg

SEQ ID NO: 15019 - DNA, 18 bp, synthetic construct
  source 1..18: mol_type = other DNA; mol_type = other DNA
gcgttggctctgcggcag

SEQ ID NO: 15020 - DNA, 18 bp, synthetic construct
  source 1..18: mol_type = other DNA; mol_type = other DNA
aacgttggctctgcggcg

SEQ ID NO: 15021 - DNA, 18 bp, synthetic construct
  source 1..18: mol_type = other DNA; mol_type = other DNA
agagttggctctgcggcg

SEQ ID NO: 15022 - DNA, 18 bp, synthetic construct
  source 1..18: mol_type = other DNA; mol_type = other DNA
agcattggctctgcggcg

SEQ ID NO: 15023 - DNA, 18 bp, synthetic construct
  source 1..18: mol_type = other DNA; mol_type = other DNA
agcgttagctctgcggcg

SEQ ID NO: 15024 - DNA, 18 bp, synthetic construct
  source 1..18: mol_type = other DNA; mol_type = other DNA
agcgttgactctgcggcg

SEQ ID NO: 15025 - DNA, 18 bp, synthetic construct
  source 1..18: mol_type = other DNA; mol_type = other DNA
agcgttggatctgcggcg

SEQ ID NO: 15026 - DNA, 18 bp, synthetic construct
  source 1..18: mol_type = other DNA; mol_type = other DNA
agcgttggctatgcggcg

SEQ ID NO: 15027 - DNA, 18 bp, synthetic construct
  source 1..18: mol_type = other DNA; mol_type = other DNA
agcgttggctctacggcg

SEQ ID NO: 15028 - DNA, 18 bp, synthetic construct
  source 1..18: mol_type = other DNA; mol_type = other DNA
agcgttggctctgaggcg

SEQ ID NO: 15029 - DNA, 18 bp, synthetic construct
  source 1..18: mol_type = other DNA; mol_type = other DNA
agcgttggctctgcagcg

SEQ ID NO: 15030 - DNA, 18 bp, synthetic construct
  source 1..18: mol_type = other DNA; mol_type = other DNA
agcgttggctctgcgacg

SEQ ID NO: 15031 - DNA, 18 bp, synthetic construct
  source 1..18: mol_type = other DNA; mol_type = other DNA
agcgttggctctgcggag

SEQ ID NO: 15032 - DNA, 18 bp, synthetic construct
  source 1..18: mol_type = other DNA; mol_type = other DNA
aagcgttggctctgcggc

SEQ ID NO: 15033 - DNA, 18 bp, synthetic construct
  source 1..18: mol_type = other DNA; mol_type = other DNA
caacgttggctctgcggc

SEQ ID NO: 15034 - DNA, 18 bp, synthetic construct
  source 1..18: mol_type = other DNA; mol_type = other DNA
cagagttggctctgcggc

SEQ ID NO: 15035 - DNA, 18 bp, synthetic construct
  source 1..18: mol_type = other DNA; mol_type = other DNA
cagcattggctctgcggc

SEQ ID NO: 15036 - DNA, 18 bp, synthetic construct
  source 1..18: mol_type = other DNA; mol_type = other DNA
cagcgttagctctgcggc

SEQ ID NO: 15037 - DNA, 18 bp, synthetic construct
  source 1..18: mol_type = other DNA; mol_type = other DNA
cagcgttgactctgcggc

SEQ ID NO: 15038 - DNA, 18 bp, synthetic construct
  source 1..18: mol_type = other DNA; mol_type = other DNA
cagcgttggatctgcggc

SEQ ID NO: 15039 - DNA, 18 bp, synthetic construct
  source 1..18: mol_type = other DNA; mol_type = other DNA
cagcgttggctatgcggc

SEQ ID NO: 15040 - DNA, 18 bp, synthetic construct
  source 1..18: mol_type = other DNA; mol_type = other DNA
cagcgttggctctacggc

SEQ ID NO: 15041 - DNA, 18 bp, synthetic construct
  source 1..18: mol_type = other DNA; mol_type = other DNA
cagcgttggctctgaggc

SEQ ID NO: 15042 - DNA, 18 bp, synthetic construct
  source 1..18: mol_type = other DNA; mol_type = other DNA
cagcgttggctctgcagc

SEQ ID NO: 15043 - DNA, 18 bp, synthetic construct
  source 1..18: mol_type = other DNA; mol_type = other DNA
cagcgttggctctgcgga

SEQ ID NO: 15044 - DNA, 18 bp, synthetic construct
  source 1..18: mol_type = other DNA; mol_type = other DNA
acagcgttggctctgcgg

SEQ ID NO: 15045 - DNA, 18 bp, synthetic construct
  source 1..18: mol_type = other DNA; mol_type = other DNA
gaagcgttggctctgcgg

SEQ ID NO: 15046 - DNA, 18 bp, synthetic construct
  source 1..18: mol_type = other DNA; mol_type = other DNA
gcaacgttggctctgcgg

SEQ ID NO: 15047 - DNA, 18 bp, synthetic construct
  source 1..18: mol_type = other DNA; mol_type = other DNA
gcagagttggctctgcgg

SEQ ID NO: 15048 - DNA, 18 bp, synthetic construct
  source 1..18: mol_type = other DNA; mol_type = other DNA
gcagcattggctctgcgg

SEQ ID NO: 15049 - DNA, 18 bp, synthetic construct
  source 1..18: mol_type = other DNA; mol_type = other DNA
gcagcgttagctctgcgg

SEQ ID NO: 15050 - DNA, 18 bp, synthetic construct
  source 1..18: mol_type = other DNA; mol_type = other DNA
gcagcgttgactctgcgg

SEQ ID NO: 15051 - DNA, 18 bp, synthetic construct
  source 1..18: mol_type = other DNA; mol_type = other DNA
gcagcgttggatctgcgg

SEQ ID NO: 15052 - DNA, 18 bp, synthetic construct
  source 1..18: mol_type = other DNA; mol_type = other DNA
gcagcgttggctatgcgg

SEQ ID NO: 15053 - DNA, 18 bp, synthetic construct
  source 1..18: mol_type = other DNA; mol_type = other DNA
gcagcgttggctctacgg

SEQ ID NO: 15054 - DNA, 18 bp, synthetic construct
  source 1..18: mol_type = other DNA; mol_type = other DNA
gcagcgttggctctgagg

SEQ ID NO: 15055 - DNA, 18 bp, synthetic construct
  source 1..18: mol_type = other DNA; mol_type = other DNA
gcagcgttggctctgcag

SEQ ID NO: 15056 - DNA, 18 bp, synthetic construct
  source 1..18: mol_type = other DNA; mol_type = other DNA
agcagcgttggctctgcg

SEQ ID NO: 15057 - DNA, 18 bp, synthetic construct
  source 1..18: mol_type = other DNA; mol_type = other DNA
cacagcgttggctctgcg

SEQ ID NO: 15058 - DNA, 18 bp, synthetic construct
  source 1..18: mol_type = other DNA; mol_type = other DNA
cgaagcgttggctctgcg

SEQ ID NO: 15059 - DNA, 18 bp, synthetic construct
  source 1..18: mol_type = other DNA; mol_type = other DNA
cgcaacgttggctctgcg

SEQ ID NO: 15060 - DNA, 18 bp, synthetic construct
  source 1..18: mol_type = other DNA; mol_type = other DNA
cgcagagttggctctgcg

SEQ ID NO: 15061 - DNA, 18 bp, synthetic construct
  source 1..18: mol_type = other DNA; mol_type = other DNA
cgcagcattggctctgcg

SEQ ID NO: 15062 - DNA, 18 bp, synthetic construct
  source 1..18: mol_type = other DNA; mol_type = other DNA
cgcagcgttagctctgcg

SEQ ID NO: 15063 - DNA, 18 bp, synthetic construct
  source 1..18: mol_type = other DNA; mol_type = other DNA
cgcagcgttgactctgcg

SEQ ID NO: 15064 - DNA, 18 bp, synthetic construct
  source 1..18: mol_type = other DNA; mol_type = other DNA
cgcagcgttggatctgcg

SEQ ID NO: 15065 - DNA, 18 bp, synthetic construct
  source 1..18: mol_type = other DNA; mol_type = other DNA
cgcagcgttggctatgcg

SEQ ID NO: 15066 - DNA, 18 bp, synthetic construct
  source 1..18: mol_type = other DNA; mol_type = other DNA
cgcagcgttggctctacg

SEQ ID NO: 15067 - DNA, 18 bp, synthetic construct
  source 1..18: mol_type = other DNA; mol_type = other DNA
cgcagcgttggctctgag

SEQ ID NO: 15068 - DNA, 18 bp, synthetic construct
  source 1..18: mol_type = other DNA; mol_type = other DNA
acgcagcgttggctctgc

SEQ ID NO: 15069 - DNA, 18 bp, synthetic construct
  source 1..18: mol_type = other DNA; mol_type = other DNA
cagcagcgttggctctgc

SEQ ID NO: 15070 - DNA, 18 bp, synthetic construct
  source 1..18: mol_type = other DNA; mol_type = other DNA
ccacagcgttggctctgc

SEQ ID NO: 15071 - DNA, 18 bp, synthetic construct
  source 1..18: mol_type = other DNA; mol_type = other DNA
ccgaagcgttggctctgc

SEQ ID NO: 15072 - DNA, 18 bp, synthetic construct
  source 1..18: mol_type = other DNA; mol_type = other DNA
ccgcaacgttggctctgc

SEQ ID NO: 15073 - DNA, 18 bp, synthetic construct
  source 1..18: mol_type = other DNA; mol_type = other DNA
ccgcagagttggctctgc

SEQ ID NO: 15074 - DNA, 18 bp, synthetic construct
  source 1..18: mol_type = other DNA; mol_type = other DNA
ccgcagcattggctctgc

SEQ ID NO: 15075 - DNA, 18 bp, synthetic construct
  source 1..18: mol_type = other DNA; mol_type = other DNA
ccgcagcgttagctctgc

SEQ ID NO: 15076 - DNA, 18 bp, synthetic construct
  source 1..18: mol_type = other DNA; mol_type = other DNA
ccgcagcgttgactctgc

SEQ ID NO: 15077 - DNA, 18 bp, synthetic construct
  source 1..18: mol_type = other DNA; mol_type = other DNA
ccgcagcgttggatctgc

SEQ ID NO: 15078 - DNA, 18 bp, synthetic construct
  source 1..18: mol_type = other DNA; mol_type = other DNA
ccgcagcgttggctatgc

SEQ ID NO: 15079 - DNA, 18 bp, synthetic construct
  source 1..18: mol_type = other DNA; mol_type = other DNA
ccgcagcgttggctctga

SEQ ID NO: 15080 - DNA, 18 bp, synthetic construct
  source 1..18: mol_type = other DNA; mol_type = other DNA
accgcagcgttggctctg

SEQ ID NO: 15081 - DNA, 18 bp, synthetic construct
  source 1..18: mol_type = other DNA; mol_type = other DNA
gacgcagcgttggctctg

SEQ ID NO: 15082 - DNA, 18 bp, synthetic construct
  source 1..18: mol_type = other DNA; mol_type = other DNA
gcagcagcgttggctctg

SEQ ID NO: 15083 - DNA, 18 bp, synthetic construct
  source 1..18: mol_type = other DNA; mol_type = other DNA
gccacagcgttggctctg

SEQ ID NO: 15084 - DNA, 18 bp, synthetic construct
  source 1..18: mol_type = other DNA; mol_type = other DNA
gccgaagcgttggctctg

SEQ ID NO: 15085 - DNA, 18 bp, synthetic construct
  source 1..18: mol_type = other DNA; mol_type = other DNA
gccgcaacgttggctctg

SEQ ID NO: 15086 - DNA, 18 bp, synthetic construct
  source 1..18: mol_type = other DNA; mol_type = other DNA
gccgcagagttggctctg

SEQ ID NO: 15087 - DNA, 18 bp, synthetic construct
  source 1..18: mol_type = other DNA; mol_type = other DNA
gccgcagcattggctctg

SEQ ID NO: 15088 - DNA, 18 bp, synthetic construct
  source 1..18: mol_type = other DNA; mol_type = other DNA
gccgcagcgttagctctg

SEQ ID NO: 15089 - DNA, 18 bp, synthetic construct
  source 1..18: mol_type = other DNA; mol_type = other DNA
gccgcagcgttgactctg

SEQ ID NO: 15090 - DNA, 18 bp, synthetic construct
  source 1..18: mol_type = other DNA; mol_type = other DNA
gccgcagcgttggatctg

SEQ ID NO: 15091 - DNA, 18 bp, synthetic construct
  source 1..18: mol_type = other DNA; mol_type = other DNA
gccgcagcgttggctatg

SEQ ID NO: 15092 - DNA, 18 bp, synthetic construct
  source 1..18: mol_type = other DNA; mol_type = other DNA
agccgcagcgttggctct

SEQ ID NO: 15093 - DNA, 18 bp, synthetic construct
  source 1..18: mol_type = other DNA; mol_type = other DNA
gaccgcagcgttggctct

SEQ ID NO: 15094 - DNA, 18 bp, synthetic construct
  source 1..18: mol_type = other DNA; mol_type = other DNA
ggacgcagcgttggctct

SEQ ID NO: 15095 - DNA, 18 bp, synthetic construct
  source 1..18: mol_type = other DNA; mol_type = other DNA
ggcagcagcgttggctct

SEQ ID NO: 15096 - DNA, 18 bp, synthetic construct
  source 1..18: mol_type = other DNA; mol_type = other DNA
ggccacagcgttggctct

SEQ ID NO: 15097 - DNA, 18 bp, synthetic construct
  source 1..18: mol_type = other DNA; mol_type = other DNA
ggccgaagcgttggctct

SEQ ID NO: 15098 - DNA, 18 bp, synthetic construct
  source 1..18: mol_type = other DNA; mol_type = other DNA
ggccgcaacgttggctct

SEQ ID NO: 15099 - DNA, 18 bp, synthetic construct
  source 1..18: mol_type = other DNA; mol_type = other DNA
ggccgcagagttggctct

SEQ ID NO: 15100 - DNA, 18 bp, synthetic construct
  source 1..18: mol_type = other DNA; mol_type = other DNA
ggccgcagcattggctct

SEQ ID NO: 15101 - DNA, 18 bp, synthetic construct
  source 1..18: mol_type = other DNA; mol_type = other DNA
ggccgcagcgttagctct

SEQ ID NO: 15102 - DNA, 18 bp, synthetic construct
  source 1..18: mol_type = other DNA; mol_type = other DNA
ggccgcagcgttggatct

SEQ ID NO: 15103 - DNA, 18 bp, synthetic construct
  source 1..18: mol_type = other DNA; mol_type = other DNA
ggccgcagcgttggctat

SEQ ID NO: 15104 - DNA, 18 bp, synthetic construct
  source 1..18: mol_type = other DNA; mol_type = other DNA
tagccgcagcgttggctc

SEQ ID NO: 15105 - DNA, 18 bp, synthetic construct
  source 1..18: mol_type = other DNA; mol_type = other DNA
tgaccgcagcgttggctc

SEQ ID NO: 15106 - DNA, 18 bp, synthetic construct
  source 1..18: mol_type = other DNA; mol_type = other DNA
tggacgcagcgttggctc

SEQ ID NO: 15107 - DNA, 18 bp, synthetic construct
  source 1..18: mol_type = other DNA; mol_type = other DNA
tggcagcagcgttggctc

SEQ ID NO: 15108 - DNA, 18 bp, synthetic construct
  source 1..18: mol_type = other DNA; mol_type = other DNA
tggccacagcgttggctc

SEQ ID NO: 15109 - DNA, 18 bp, synthetic construct
  source 1..18: mol_type = other DNA; mol_type = other DNA
tggccgaagcgttggctc

SEQ ID NO: 15110 - DNA, 18 bp, synthetic construct
  source 1..18: mol_type = other DNA; mol_type = other DNA
tggccgcaacgttggctc

SEQ ID NO: 15111 - DNA, 18 bp, synthetic construct
  source 1..18: mol_type = other DNA; mol_type = other DNA
tggccgcagagttggctc

SEQ ID NO: 15112 - DNA, 18 bp, synthetic construct
  source 1..18: mol_type = other DNA; mol_type = other DNA
tggccgcagcattggctc

SEQ ID NO: 15113 - DNA, 18 bp, synthetic construct
  source 1..18: mol_type = other DNA; mol_type = other DNA
tggccgcagcgttagctc

SEQ ID NO: 15114 - DNA, 18 bp, synthetic construct
  source 1..18: mol_type = other DNA; mol_type = other DNA
tggccgcagcgttggatc

SEQ ID NO: 15115 - DNA, 18 bp, synthetic construct
  source 1..18: mol_type = other DNA; mol_type = other DNA
tggccgcagcgttggcta

SEQ ID NO: 15116 - DNA, 18 bp, synthetic construct
  source 1..18: mol_type = other DNA; mol_type = other DNA
atggccgcagcgttggct

SEQ ID NO: 15117 - DNA, 18 bp, synthetic construct
  source 1..18: mol_type = other DNA; mol_type = other DNA
ctagccgcagcgttggct

SEQ ID NO: 15118 - DNA, 18 bp, synthetic construct
  source 1..18: mol_type = other DNA; mol_type = other DNA
ctgaccgcagcgttggct

SEQ ID NO: 15119 - DNA, 18 bp, synthetic construct
  source 1..18: mol_type = other DNA; mol_type = other DNA
ctggacgcagcgttggct

SEQ ID NO: 15120 - DNA, 18 bp, synthetic construct
  source 1..18: mol_type = other DNA; mol_type = other DNA
ctggcagcagcgttggct

SEQ ID NO: 15121 - DNA, 18 bp, synthetic construct
  source 1..18: mol_type = other DNA; mol_type = other DNA
ctggccacagcgttggct

SEQ ID NO: 15122 - DNA, 18 bp, synthetic construct
  source 1..18: mol_type = other DNA; mol_type = other DNA
ctggccgaagcgttggct

SEQ ID NO: 15123 - DNA, 18 bp, synthetic construct
  source 1..18: mol_type = other DNA; mol_type = other DNA
ctggccgcaacgttggct

SEQ ID NO: 15124 - DNA, 18 bp, synthetic construct
  source 1..18: mol_type = other DNA; mol_type = other DNA
ctggccgcagagttggct

SEQ ID NO: 15125 - DNA, 18 bp, synthetic construct
  source 1..18: mol_type = other DNA; mol_type = other DNA
ctggccgcagcattggct

SEQ ID NO: 15126 - DNA, 18 bp, synthetic construct
  source 1..18: mol_type = other DNA; mol_type = other DNA
ctggccgcagcgttagct

SEQ ID NO: 15127 - DNA, 18 bp, synthetic construct
  source 1..18: mol_type = other DNA; mol_type = other DNA
ctggccgcagcgttggat

SEQ ID NO: 15128 - DNA, 18 bp, synthetic construct
  source 1..18: mol_type = other DNA; mol_type = other DNA
tatggccgcagcgttggc

SEQ ID NO: 15129 - DNA, 18 bp, synthetic construct
  source 1..18: mol_type = other DNA; mol_type = other DNA
tctagccgcagcgttggc

SEQ ID NO: 15130 - DNA, 18 bp, synthetic construct
  source 1..18: mol_type = other DNA; mol_type = other DNA
tctgaccgcagcgttggc

SEQ ID NO: 15131 - DNA, 18 bp, synthetic construct
  source 1..18: mol_type = other DNA; mol_type = other DNA
tctggacgcagcgttggc

SEQ ID NO: 15132 - DNA, 18 bp, synthetic construct
  source 1..18: mol_type = other DNA; mol_type = other DNA
tctggcagcagcgttggc

SEQ ID NO: 15133 - DNA, 18 bp, synthetic construct
  source 1..18: mol_type = other DNA; mol_type = other DNA
tctggccacagcgttggc

SEQ ID NO: 15134 - DNA, 18 bp, synthetic construct
  source 1..18: mol_type = other DNA; mol_type = other DNA
tctggccgaagcgttggc

SEQ ID NO: 15135 - DNA, 18 bp, synthetic construct
  source 1..18: mol_type = other DNA; mol_type = other DNA
tctggccgcaacgttggc

SEQ ID NO: 15136 - DNA, 18 bp, synthetic construct
  source 1..18: mol_type = other DNA; mol_type = other DNA
tctggccgcagagttggc

SEQ ID NO: 15137 - DNA, 18 bp, synthetic construct
  source 1..18: mol_type = other DNA; mol_type = other DNA
tctggccgcagcattggc

SEQ ID NO: 15138 - DNA, 18 bp, synthetic construct
  source 1..18: mol_type = other DNA; mol_type = other DNA
tctggccgcagcgttagc

SEQ ID NO: 15139 - DNA, 18 bp, synthetic construct
  source 1..18: mol_type = other DNA; mol_type = other DNA
tctggccgcagcgttgga

SEQ ID NO: 15140 - DNA, 18 bp, synthetic construct
  source 1..18: mol_type = other DNA; mol_type = other DNA
atctggccgcagcgttgg

SEQ ID NO: 15141 - DNA, 18 bp, synthetic construct
  source 1..18: mol_type = other DNA; mol_type = other DNA
gtatggccgcagcgttgg

SEQ ID NO: 15142 - DNA, 18 bp, synthetic construct
  source 1..18: mol_type = other DNA; mol_type = other DNA
gtctagccgcagcgttgg

SEQ ID NO: 15143 - DNA, 18 bp, synthetic construct
  source 1..18: mol_type = other DNA; mol_type = other DNA
gtctgaccgcagcgttgg

SEQ ID NO: 15144 - DNA, 18 bp, synthetic construct
  source 1..18: mol_type = other DNA; mol_type = other DNA
gtctggacgcagcgttgg

SEQ ID NO: 15145 - DNA, 18 bp, synthetic construct
  source 1..18: mol_type = other DNA; mol_type = other DNA
gtctggcagcagcgttgg

SEQ ID NO: 15146 - DNA, 18 bp, synthetic construct
  source 1..18: mol_type = other DNA; mol_type = other DNA
gtctggccacagcgttgg

SEQ ID NO: 15147 - DNA, 18 bp, synthetic construct
  source 1..18: mol_type = other DNA; mol_type = other DNA
gtctggccgaagcgttgg

SEQ ID NO: 15148 - DNA, 18 bp, synthetic construct
  source 1..18: mol_type = other DNA; mol_type = other DNA
gtctggccgcaacgttgg

SEQ ID NO: 15149 - DNA, 18 bp, synthetic construct
  source 1..18: mol_type = other DNA; mol_type = other DNA
gtctggccgcagagttgg

SEQ ID NO: 15150 - DNA, 18 bp, synthetic construct
  source 1..18: mol_type = other DNA; mol_type = other DNA
gtctggccgcagcattgg

SEQ ID NO: 15151 - DNA, 18 bp, synthetic construct
  source 1..18: mol_type = other DNA; mol_type = other DNA
gtctggccgcagcgttag

SEQ ID NO: 15152 - DNA, 18 bp, synthetic construct
  source 1..18: mol_type = other DNA; mol_type = other DNA
tatctggccgcagcgttg

SEQ ID NO: 15153 - DNA, 18 bp, synthetic construct
  source 1..18: mol_type = other DNA; mol_type = other DNA
tgtatggccgcagcgttg

SEQ ID NO: 15154 - DNA, 18 bp, synthetic construct
  source 1..18: mol_type = other DNA; mol_type = other DNA
tgtctagccgcagcgttg

SEQ ID NO: 15155 - DNA, 18 bp, synthetic construct
  source 1..18: mol_type = other DNA; mol_type = other DNA
tgtctgaccgcagcgttg

SEQ ID NO: 15156 - DNA, 18 bp, synthetic construct
  source 1..18: mol_type = other DNA; mol_type = other DNA
tgtctggacgcagcgttg

SEQ ID NO: 15157 - DNA, 18 bp, synthetic construct
  source 1..18: mol_type = other DNA; mol_type = other DNA
tgtctggcagcagcgttg

SEQ ID NO: 15158 - DNA, 18 bp, synthetic construct
  source 1..18: mol_type = other DNA; mol_type = other DNA
tgtctggccacagcgttg

SEQ ID NO: 15159 - DNA, 18 bp, synthetic construct
  source 1..18: mol_type = other DNA; mol_type = other DNA
tgtctggccgaagcgttg

SEQ ID NO: 15160 - DNA, 18 bp, synthetic construct
  source 1..18: mol_type = other DNA; mol_type = other DNA
tgtctggccgcaacgttg

SEQ ID NO: 15161 - DNA, 18 bp, synthetic construct
  source 1..18: mol_type = other DNA; mol_type = other DNA
tgtctggccgcagagttg

SEQ ID NO: 15162 - DNA, 18 bp, synthetic construct
  source 1..18: mol_type = other DNA; mol_type = other DNA
tgtctggccgcagcattg

SEQ ID NO: 15163 - DNA, 18 bp, synthetic construct
  source 1..18: mol_type = other DNA; mol_type = other DNA
atatctggccgcagcgtt

SEQ ID NO: 15164 - DNA, 18 bp, synthetic construct
  source 1..18: mol_type = other DNA; mol_type = other DNA
atgtatggccgcagcgtt

SEQ ID NO: 15165 - DNA, 18 bp, synthetic construct
  source 1..18: mol_type = other DNA; mol_type = other DNA
atgtctagccgcagcgtt

SEQ ID NO: 15166 - DNA, 18 bp, synthetic construct
  source 1..18: mol_type = other DNA; mol_type = other DNA
atgtctgaccgcagcgtt

SEQ ID NO: 15167 - DNA, 18 bp, synthetic construct
  source 1..18: mol_type = other DNA; mol_type = other DNA
atgtctggacgcagcgtt

SEQ ID NO: 15168 - DNA, 18 bp, synthetic construct
  source 1..18: mol_type = other DNA; mol_type = other DNA
atgtctggcagcagcgtt

SEQ ID NO: 15169 - DNA, 18 bp, synthetic construct
  source 1..18: mol_type = other DNA; mol_type = other DNA
atgtctggccacagcgtt

SEQ ID NO: 15170 - DNA, 18 bp, synthetic construct
  source 1..18: mol_type = other DNA; mol_type = other DNA
atgtctggccgaagcgtt

SEQ ID NO: 15171 - DNA, 18 bp, synthetic construct
  source 1..18: mol_type = other DNA; mol_type = other DNA
atgtctggccgcaacgtt

SEQ ID NO: 15172 - DNA, 18 bp, synthetic construct
  source 1..18: mol_type = other DNA; mol_type = other DNA
atgtctggccgcagagtt

SEQ ID NO: 15173 - DNA, 18 bp, synthetic construct
  source 1..18: mol_type = other DNA; mol_type = other DNA
aatgtctggccgcagcgt

SEQ ID NO: 15174 - DNA, 18 bp, synthetic construct
  source 1..18: mol_type = other DNA; mol_type = other DNA
gatatctggccgcagcgt

SEQ ID NO: 15175 - DNA, 18 bp, synthetic construct
  source 1..18: mol_type = other DNA; mol_type = other DNA
gatgtatggccgcagcgt

SEQ ID NO: 15176 - DNA, 18 bp, synthetic construct
  source 1..18: mol_type = other DNA; mol_type = other DNA
gatgtctagccgcagcgt

SEQ ID NO: 15177 - DNA, 18 bp, synthetic construct
  source 1..18: mol_type = other DNA; mol_type = other DNA
gatgtctgaccgcagcgt

SEQ ID NO: 15178 - DNA, 18 bp, synthetic construct
  source 1..18: mol_type = other DNA; mol_type = other DNA
gatgtctggacgcagcgt

SEQ ID NO: 15179 - DNA, 18 bp, synthetic construct
  source 1..18: mol_type = other DNA; mol_type = other DNA
gatgtctggcagcagcgt

SEQ ID NO: 15180 - DNA, 18 bp, synthetic construct
  source 1..18: mol_type = other DNA; mol_type = other DNA
gatgtctggccacagcgt

SEQ ID NO: 15181 - DNA, 18 bp, synthetic construct
  source 1..18: mol_type = other DNA; mol_type = other DNA
gatgtctggccgaagcgt

SEQ ID NO: 15182 - DNA, 18 bp, synthetic construct
  source 1..18: mol_type = other DNA; mol_type = other DNA
gatgtctggccgcaacgt

SEQ ID NO: 15183 - DNA, 18 bp, synthetic construct
  source 1..18: mol_type = other DNA; mol_type = other DNA
gatgtctggccgcagagt

SEQ ID NO: 15184 - DNA, 18 bp, synthetic construct
  source 1..18: mol_type = other DNA; mol_type = other DNA
agatgtctggccgcagcg

SEQ ID NO: 15185 - DNA, 18 bp, synthetic construct
  source 1..18: mol_type = other DNA; mol_type = other DNA
caatgtctggccgcagcg

SEQ ID NO: 15186 - DNA, 18 bp, synthetic construct
  source 1..18: mol_type = other DNA; mol_type = other DNA
cgatatctggccgcagcg

SEQ ID NO: 15187 - DNA, 18 bp, synthetic construct
  source 1..18: mol_type = other DNA; mol_type = other DNA
cgatgtatggccgcagcg

SEQ ID NO: 15188 - DNA, 18 bp, synthetic construct
  source 1..18: mol_type = other DNA; mol_type = other DNA
cgatgtctagccgcagcg

SEQ ID NO: 15189 - DNA, 18 bp, synthetic construct
  source 1..18: mol_type = other DNA; mol_type = other DNA
cgatgtctgaccgcagcg

SEQ ID NO: 15190 - DNA, 18 bp, synthetic construct
  source 1..18: mol_type = other DNA; mol_type = other DNA
cgatgtctggacgcagcg

SEQ ID NO: 15191 - DNA, 18 bp, synthetic construct
  source 1..18: mol_type = other DNA; mol_type = other DNA
cgatgtctggcagcagcg

SEQ ID NO: 15192 - DNA, 18 bp, synthetic construct
  source 1..18: mol_type = other DNA; mol_type = other DNA
cgatgtctggccacagcg

SEQ ID NO: 15193 - DNA, 18 bp, synthetic construct
  source 1..18: mol_type = other DNA; mol_type = other DNA
cgatgtctggccgaagcg

SEQ ID NO: 15194 - DNA, 18 bp, synthetic construct
  source 1..18: mol_type = other DNA; mol_type = other DNA
cgatgtctggccgcaacg

SEQ ID NO: 15195 - DNA, 18 bp, synthetic construct
  source 1..18: mol_type = other DNA; mol_type = other DNA
cgatgtctggccgcagag

SEQ ID NO: 15196 - DNA, 18 bp, synthetic construct
  source 1..18: mol_type = other DNA; mol_type = other DNA
acgatgtctggccgcagc

SEQ ID NO: 15197 - DNA, 18 bp, synthetic construct
  source 1..18: mol_type = other DNA; mol_type = other DNA
gagatgtctggccgcagc

SEQ ID NO: 15198 - DNA, 18 bp, synthetic construct
  source 1..18: mol_type = other DNA; mol_type = other DNA
gcaatgtctggccgcagc

SEQ ID NO: 15199 - DNA, 18 bp, synthetic construct
  source 1..18: mol_type = other DNA; mol_type = other DNA
gcgatatctggccgcagc

SEQ ID NO: 15200 - DNA, 18 bp, synthetic construct
  source 1..18: mol_type = other DNA; mol_type = other DNA
gcgatgtatggccgcagc

SEQ ID NO: 15201 - DNA, 18 bp, synthetic construct
  source 1..18: mol_type = other DNA; mol_type = other DNA
gcgatgtctagccgcagc

SEQ ID NO: 15202 - DNA, 18 bp, synthetic construct
  source 1..18: mol_type = other DNA; mol_type = other DNA
gcgatgtctgaccgcagc

SEQ ID NO: 15203 - DNA, 18 bp, synthetic construct
  source 1..18: mol_type = other DNA; mol_type = other DNA
gcgatgtctggacgcagc

SEQ ID NO: 15204 - DNA, 18 bp, synthetic construct
  source 1..18: mol_type = other DNA; mol_type = other DNA
gcgatgtctggcagcagc

SEQ ID NO: 15205 - DNA, 18 bp, synthetic construct
  source 1..18: mol_type = other DNA; mol_type = other DNA
gcgatgtctggccacagc

SEQ ID NO: 15206 - DNA, 18 bp, synthetic construct
  source 1..18: mol_type = other DNA; mol_type = other DNA
gcgatgtctggccgaagc

SEQ ID NO: 15207 - DNA, 18 bp, synthetic construct
  source 1..18: mol_type = other DNA; mol_type = other DNA
gcgatgtctggccgcaga

SEQ ID NO: 15208 - DNA, 18 bp, synthetic construct
  source 1..18: mol_type = other DNA; mol_type = other DNA
tacgatgtctggccgcag

SEQ ID NO: 15209 - DNA, 18 bp, synthetic construct
  source 1..18: mol_type = other DNA; mol_type = other DNA
tgagatgtctggccgcag

SEQ ID NO: 15210 - DNA, 18 bp, synthetic construct
  source 1..18: mol_type = other DNA; mol_type = other DNA
tgcaatgtctggccgcag

SEQ ID NO: 15211 - DNA, 18 bp, synthetic construct
  source 1..18: mol_type = other DNA; mol_type = other DNA
tgcgatatctggccgcag

SEQ ID NO: 15212 - DNA, 18 bp, synthetic construct
  source 1..18: mol_type = other DNA; mol_type = other DNA
tgcgatgtatggccgcag

SEQ ID NO: 15213 - DNA, 18 bp, synthetic construct
  source 1..18: mol_type = other DNA; mol_type = other DNA
tgcgatgtctagccgcag

SEQ ID NO: 15214 - DNA, 18 bp, synthetic construct
  source 1..18: mol_type = other DNA; mol_type = other DNA
tgcgatgtctgaccgcag

SEQ ID NO: 15215 - DNA, 18 bp, synthetic construct
  source 1..18: mol_type = other DNA; mol_type = other DNA
tgcgatgtctggacgcag

SEQ ID NO: 15216 - DNA, 18 bp, synthetic construct
  source 1..18: mol_type = other DNA; mol_type = other DNA
tgcgatgtctggcagcag

SEQ ID NO: 15217 - DNA, 18 bp, synthetic construct
  source 1..18: mol_type = other DNA; mol_type = other DNA
tgcgatgtctggccacag

SEQ ID NO: 15218 - DNA, 18 bp, synthetic construct
  source 1..18: mol_type = other DNA; mol_type = other DNA
tgcgatgtctggccgaag

SEQ ID NO: 15219 - DNA, 18 bp, synthetic construct
  source 1..18: mol_type = other DNA; mol_type = other DNA
atgcgatgtctggccgca

SEQ ID NO: 15220 - DNA, 18 bp, synthetic construct
  source 1..18: mol_type = other DNA; mol_type = other DNA
ctacgatgtctggccgca

SEQ ID NO: 15221 - DNA, 18 bp, synthetic construct
  source 1..18: mol_type = other DNA; mol_type = other DNA
ctgagatgtctggccgca

SEQ ID NO: 15222 - DNA, 18 bp, synthetic construct
  source 1..18: mol_type = other DNA; mol_type = other DNA
ctgcaatgtctggccgca

SEQ ID NO: 15223 - DNA, 18 bp, synthetic construct
  source 1..18: mol_type = other DNA; mol_type = other DNA
ctgcgatatctggccgca

SEQ ID NO: 15224 - DNA, 18 bp, synthetic construct
  source 1..18: mol_type = other DNA; mol_type = other DNA
ctgcgatgtatggccgca

SEQ ID NO: 15225 - DNA, 18 bp, synthetic construct
  source 1..18: mol_type = other DNA; mol_type = other DNA
ctgcgatgtctagccgca

SEQ ID NO: 15226 - DNA, 18 bp, synthetic construct
  source 1..18: mol_type = other DNA; mol_type = other DNA
ctgcgatgtctgaccgca

SEQ ID NO: 15227 - DNA, 18 bp, synthetic construct
  source 1..18: mol_type = other DNA; mol_type = other DNA
ctgcgatgtctggacgca

SEQ ID NO: 15228 - DNA, 18 bp, synthetic construct
  source 1..18: mol_type = other DNA; mol_type = other DNA
ctgcgatgtctggcagca

SEQ ID NO: 15229 - DNA, 18 bp, synthetic construct
  source 1..18: mol_type = other DNA; mol_type = other DNA
ctgcgatgtctggccgaa

SEQ ID NO: 15230 - DNA, 18 bp, synthetic construct
  source 1..18: mol_type = other DNA; mol_type = other DNA
tatgcgatgtctggccgc

SEQ ID NO: 15231 - DNA, 18 bp, synthetic construct
  source 1..18: mol_type = other DNA; mol_type = other DNA
tctacgatgtctggccgc

SEQ ID NO: 15232 - DNA, 18 bp, synthetic construct
  source 1..18: mol_type = other DNA; mol_type = other DNA
tctgagatgtctggccgc

SEQ ID NO: 15233 - DNA, 18 bp, synthetic construct
  source 1..18: mol_type = other DNA; mol_type = other DNA
tctgcaatgtctggccgc

SEQ ID NO: 15234 - DNA, 18 bp, synthetic construct
  source 1..18: mol_type = other DNA; mol_type = other DNA
tctgcgatatctggccgc

SEQ ID NO: 15235 - DNA, 18 bp, synthetic construct
  source 1..18: mol_type = other DNA; mol_type = other DNA
tctgcgatgtatggccgc

SEQ ID NO: 15236 - DNA, 18 bp, synthetic construct
  source 1..18: mol_type = other DNA; mol_type = other DNA
tctgcgatgtctagccgc

SEQ ID NO: 15237 - DNA, 18 bp, synthetic construct
  source 1..18: mol_type = other DNA; mol_type = other DNA
tctgcgatgtctgaccgc

SEQ ID NO: 15238 - DNA, 18 bp, synthetic construct
  source 1..18: mol_type = other DNA; mol_type = other DNA
tctgcgatgtctggacgc

SEQ ID NO: 15239 - DNA, 18 bp, synthetic construct
  source 1..18: mol_type = other DNA; mol_type = other DNA
tctgcgatgtctggcagc

SEQ ID NO: 15240 - DNA, 18 bp, synthetic construct
  source 1..18: mol_type = other DNA; mol_type = other DNA
tctgcgatgtctggccga

SEQ ID NO: 15241 - DNA, 18 bp, synthetic construct
  source 1..18: mol_type = other DNA; mol_type = other DNA
atctgcgatgtctggccg

SEQ ID NO: 15242 - DNA, 18 bp, synthetic construct
  source 1..18: mol_type = other DNA; mol_type = other DNA
gtatgcgatgtctggccg

SEQ ID NO: 15243 - DNA, 18 bp, synthetic construct
  source 1..18: mol_type = other DNA; mol_type = other DNA
gtctacgatgtctggccg

SEQ ID NO: 15244 - DNA, 18 bp, synthetic construct
  source 1..18: mol_type = other DNA; mol_type = other DNA
gtctgagatgtctggccg

SEQ ID NO: 15245 - DNA, 18 bp, synthetic construct
  source 1..18: mol_type = other DNA; mol_type = other DNA
gtctgcaatgtctggccg

SEQ ID NO: 15246 - DNA, 18 bp, synthetic construct
  source 1..18: mol_type = other DNA; mol_type = other DNA
gtctgcgatatctggccg

SEQ ID NO: 15247 - DNA, 18 bp, synthetic construct
  source 1..18: mol_type = other DNA; mol_type = other DNA
gtctgcgatgtatggccg

SEQ ID NO: 15248 - DNA, 18 bp, synthetic construct
  source 1..18: mol_type = other DNA; mol_type = other DNA
gtctgcgatgtctagccg

SEQ ID NO: 15249 - DNA, 18 bp, synthetic construct
  source 1..18: mol_type = other DNA; mol_type = other DNA
gtctgcgatgtctgaccg

SEQ ID NO: 15250 - DNA, 18 bp, synthetic construct
  source 1..18: mol_type = other DNA; mol_type = other DNA
gtctgcgatgtctggacg

SEQ ID NO: 15251 - DNA, 18 bp, synthetic construct
  source 1..18: mol_type = other DNA; mol_type = other DNA
gtctgcgatgtctggcag

SEQ ID NO: 15252 - DNA, 18 bp, synthetic construct
  source 1..18: mol_type = other DNA; mol_type = other DNA
agtctgcgatgtctggcc

SEQ ID NO: 15253 - DNA, 18 bp, synthetic construct
  source 1..18: mol_type = other DNA; mol_type = other DNA
catctgcgatgtctggcc

SEQ ID NO: 15254 - DNA, 18 bp, synthetic construct
  source 1..18: mol_type = other DNA; mol_type = other DNA
cgtatgcgatgtctggcc

SEQ ID NO: 15255 - DNA, 18 bp, synthetic construct
  source 1..18: mol_type = other DNA; mol_type = other DNA
cgtctacgatgtctggcc

SEQ ID NO: 15256 - DNA, 18 bp, synthetic construct
  source 1..18: mol_type = other DNA; mol_type = other DNA
cgtctgagatgtctggcc

SEQ ID NO: 15257 - DNA, 18 bp, synthetic construct
  source 1..18: mol_type = other DNA; mol_type = other DNA
cgtctgcaatgtctggcc

SEQ ID NO: 15258 - DNA, 18 bp, synthetic construct
  source 1..18: mol_type = other DNA; mol_type = other DNA
cgtctgcgatatctggcc

SEQ ID NO: 15259 - DNA, 18 bp, synthetic construct
  source 1..18: mol_type = other DNA; mol_type = other DNA
cgtctgcgatgtatggcc

SEQ ID NO: 15260 - DNA, 18 bp, synthetic construct
  source 1..18: mol_type = other DNA; mol_type = other DNA
cgtctgcgatgtctagcc

SEQ ID NO: 15261 - DNA, 18 bp, synthetic construct
  source 1..18: mol_type = other DNA; mol_type = other DNA
cgtctgcgatgtctggac

SEQ ID NO: 15262 - DNA, 18 bp, synthetic construct
  source 1..18: mol_type = other DNA; mol_type = other DNA
cgtctgcgatgtctggca

SEQ ID NO: 15263 - DNA, 18 bp, synthetic construct
  source 1..18: mol_type = other DNA; mol_type = other DNA
acgtctgcgatgtctggc

SEQ ID NO: 15264 - DNA, 18 bp, synthetic construct
  source 1..18: mol_type = other DNA; mol_type = other DNA
gagtctgcgatgtctggc

SEQ ID NO: 15265 - DNA, 18 bp, synthetic construct
  source 1..18: mol_type = other DNA; mol_type = other DNA
gcatctgcgatgtctggc

SEQ ID NO: 15266 - DNA, 18 bp, synthetic construct
  source 1..18: mol_type = other DNA; mol_type = other DNA
gcgtatgcgatgtctggc

SEQ ID NO: 15267 - DNA, 18 bp, synthetic construct
  source 1..18: mol_type = other DNA; mol_type = other DNA
gcgtctacgatgtctggc

SEQ ID NO: 15268 - DNA, 18 bp, synthetic construct
  source 1..18: mol_type = other DNA; mol_type = other DNA
gcgtctgagatgtctggc

SEQ ID NO: 15269 - DNA, 18 bp, synthetic construct
  source 1..18: mol_type = other DNA; mol_type = other DNA
gcgtctgcaatgtctggc

SEQ ID NO: 15270 - DNA, 18 bp, synthetic construct
  source 1..18: mol_type = other DNA; mol_type = other DNA
gcgtctgcgatatctggc

SEQ ID NO: 15271 - DNA, 18 bp, synthetic construct
  source 1..18: mol_type = other DNA; mol_type = other DNA
gcgtctgcgatgtatggc

SEQ ID NO: 15272 - DNA, 18 bp, synthetic construct
  source 1..18: mol_type = other DNA; mol_type = other DNA
gcgtctgcgatgtctagc

SEQ ID NO: 15273 - DNA, 18 bp, synthetic construct
  source 1..18: mol_type = other DNA; mol_type = other DNA
gcgtctgcgatgtctgga

SEQ ID NO: 15274 - DNA, 18 bp, synthetic construct
  source 1..18: mol_type = other DNA; mol_type = other DNA
tacgtctgcgatgtctgg

SEQ ID NO: 15275 - DNA, 18 bp, synthetic construct
  source 1..18: mol_type = other DNA; mol_type = other DNA
tgagtctgcgatgtctgg

SEQ ID NO: 15276 - DNA, 18 bp, synthetic construct
  source 1..18: mol_type = other DNA; mol_type = other DNA
tgcatctgcgatgtctgg

SEQ ID NO: 15277 - DNA, 18 bp, synthetic construct
  source 1..18: mol_type = other DNA; mol_type = other DNA
tgcgtatgcgatgtctgg

SEQ ID NO: 15278 - DNA, 18 bp, synthetic construct
  source 1..18: mol_type = other DNA; mol_type = other DNA
tgcgtctacgatgtctgg

SEQ ID NO: 15279 - DNA, 18 bp, synthetic construct
  source 1..18: mol_type = other DNA; mol_type = other DNA
tgcgtctgagatgtctgg

SEQ ID NO: 15280 - DNA, 18 bp, synthetic construct
  source 1..18: mol_type = other DNA; mol_type = other DNA
tgcgtctgcaatgtctgg

SEQ ID NO: 15281 - DNA, 18 bp, synthetic construct
  source 1..18: mol_type = other DNA; mol_type = other DNA
tgcgtctgcgatatctgg

SEQ ID NO: 15282 - DNA, 18 bp, synthetic construct
  source 1..18: mol_type = other DNA; mol_type = other DNA
tgcgtctgcgatgtatgg

SEQ ID NO: 15283 - DNA, 18 bp, synthetic construct
  source 1..18: mol_type = other DNA; mol_type = other DNA
tgcgtctgcgatgtctag

SEQ ID NO: 15284 - DNA, 18 bp, synthetic construct
  source 1..18: mol_type = other DNA; mol_type = other DNA
atgcgtctgcgatgtctg

SEQ ID NO: 15285 - DNA, 18 bp, synthetic construct
  source 1..18: mol_type = other DNA; mol_type = other DNA
ctacgtctgcgatgtctg

SEQ ID NO: 15286 - DNA, 18 bp, synthetic construct
  source 1..18: mol_type = other DNA; mol_type = other DNA
ctgagtctgcgatgtctg

SEQ ID NO: 15287 - DNA, 18 bp, synthetic construct
  source 1..18: mol_type = other DNA; mol_type = other DNA
ctgcatctgcgatgtctg

SEQ ID NO: 15288 - DNA, 18 bp, synthetic construct
  source 1..18: mol_type = other DNA; mol_type = other DNA
ctgcgtatgcgatgtctg

SEQ ID NO: 15289 - DNA, 18 bp, synthetic construct
  source 1..18: mol_type = other DNA; mol_type = other DNA
ctgcgtctacgatgtctg

SEQ ID NO: 15290 - DNA, 18 bp, synthetic construct
  source 1..18: mol_type = other DNA; mol_type = other DNA
ctgcgtctgagatgtctg

SEQ ID NO: 15291 - DNA, 18 bp, synthetic construct
  source 1..18: mol_type = other DNA; mol_type = other DNA
ctgcgtctgcaatgtctg

SEQ ID NO: 15292 - DNA, 18 bp, synthetic construct
  source 1..18: mol_type = other DNA; mol_type = other DNA
ctgcgtctgcgatatctg

SEQ ID NO: 15293 - DNA, 18 bp, synthetic construct
  source 1..18: mol_type = other DNA; mol_type = other DNA
ctgcgtctgcgatgtatg

SEQ ID NO: 15294 - DNA, 18 bp, synthetic construct
  source 1..18: mol_type = other DNA; mol_type = other DNA
tatgcgtctgcgatgtct

SEQ ID NO: 15295 - DNA, 18 bp, synthetic construct
  source 1..18: mol_type = other DNA; mol_type = other DNA
tctacgtctgcgatgtct

SEQ ID NO: 15296 - DNA, 18 bp, synthetic construct
  source 1..18: mol_type = other DNA; mol_type = other DNA
tctgagtctgcgatgtct

SEQ ID NO: 15297 - DNA, 18 bp, synthetic construct
  source 1..18: mol_type = other DNA; mol_type = other DNA
tctgcatctgcgatgtct

SEQ ID NO: 15298 - DNA, 18 bp, synthetic construct
  source 1..18: mol_type = other DNA; mol_type = other DNA
tctgcgtatgcgatgtct

SEQ ID NO: 15299 - DNA, 18 bp, synthetic construct
  source 1..18: mol_type = other DNA; mol_type = other DNA
tctgcgtctacgatgtct

SEQ ID NO: 15300 - DNA, 18 bp, synthetic construct
  source 1..18: mol_type = other DNA; mol_type = other DNA
tctgcgtctgagatgtct

SEQ ID NO: 15301 - DNA, 18 bp, synthetic construct
  source 1..18: mol_type = other DNA; mol_type = other DNA
tctgcgtctgcaatgtct

SEQ ID NO: 15302 - DNA, 18 bp, synthetic construct
  source 1..18: mol_type = other DNA; mol_type = other DNA
tctgcgtctgcgatgtat

SEQ ID NO: 15303 - DNA, 18 bp, synthetic construct
  source 1..18: mol_type = other DNA; mol_type = other DNA
atctgcgtctgcgatgtc

SEQ ID NO: 15304 - DNA, 18 bp, synthetic construct
  source 1..18: mol_type = other DNA; mol_type = other DNA
gtatgcgtctgcgatgtc

SEQ ID NO: 15305 - DNA, 18 bp, synthetic construct
  source 1..18: mol_type = other DNA; mol_type = other DNA
gtctacgtctgcgatgtc

SEQ ID NO: 15306 - DNA, 18 bp, synthetic construct
  source 1..18: mol_type = other DNA; mol_type = other DNA
gtctgagtctgcgatgtc

SEQ ID NO: 15307 - DNA, 18 bp, synthetic construct
  source 1..18: mol_type = other DNA; mol_type = other DNA
gtctgcatctgcgatgtc

SEQ ID NO: 15308 - DNA, 18 bp, synthetic construct
  source 1..18: mol_type = other DNA; mol_type = other DNA
gtctgcgtatgcgatgtc

SEQ ID NO: 15309 - DNA, 18 bp, synthetic construct
  source 1..18: mol_type = other DNA; mol_type = other DNA
gtctgcgtctacgatgtc

SEQ ID NO: 15310 - DNA, 18 bp, synthetic construct
  source 1..18: mol_type = other DNA; mol_type = other DNA
gtctgcgtctgagatgtc

SEQ ID NO: 15311 - DNA, 18 bp, synthetic construct
  source 1..18: mol_type = other DNA; mol_type = other DNA
gtctgcgtctgcaatgtc

SEQ ID NO: 15312 - DNA, 18 bp, synthetic construct
  source 1..18: mol_type = other DNA; mol_type = other DNA
gtctgcgtctgcgatgta

SEQ ID NO: 15313 - DNA, 18 bp, synthetic construct
  source 1..18: mol_type = other DNA; mol_type = other DNA
aatctgcgtctgcgatgt

SEQ ID NO: 15314 - DNA, 18 bp, synthetic construct
  source 1..18: mol_type = other DNA; mol_type = other DNA
agtatgcgtctgcgatgt

SEQ ID NO: 15315 - DNA, 18 bp, synthetic construct
  source 1..18: mol_type = other DNA; mol_type = other DNA
agtctacgtctgcgatgt

SEQ ID NO: 15316 - DNA, 18 bp, synthetic construct
  source 1..18: mol_type = other DNA; mol_type = other DNA
agtctgagtctgcgatgt

SEQ ID NO: 15317 - DNA, 18 bp, synthetic construct
  source 1..18: mol_type = other DNA; mol_type = other DNA
agtctgcatctgcgatgt

SEQ ID NO: 15318 - DNA, 18 bp, synthetic construct
  source 1..18: mol_type = other DNA; mol_type = other DNA
agtctgcgtatgcgatgt

SEQ ID NO: 15319 - DNA, 18 bp, synthetic construct
  source 1..18: mol_type = other DNA; mol_type = other DNA
agtctgcgtctacgatgt

SEQ ID NO: 15320 - DNA, 18 bp, synthetic construct
  source 1..18: mol_type = other DNA; mol_type = other DNA
agtctgcgtctgagatgt

SEQ ID NO: 15321 - DNA, 18 bp, synthetic construct
  source 1..18: mol_type = other DNA; mol_type = other DNA
agtctgcgtctgcaatgt

SEQ ID NO: 15322 - DNA, 18 bp, synthetic construct
  source 1..18: mol_type = other DNA; mol_type = other DNA
aagtctgcgtctgcgatg

SEQ ID NO: 15323 - DNA, 18 bp, synthetic construct
  source 1..18: mol_type = other DNA; mol_type = other DNA
gaatctgcgtctgcgatg

SEQ ID NO: 15324 - DNA, 18 bp, synthetic construct
  source 1..18: mol_type = other DNA; mol_type = other DNA
gagtatgcgtctgcgatg

SEQ ID NO: 15325 - DNA, 18 bp, synthetic construct
  source 1..18: mol_type = other DNA; mol_type = other DNA
gagtctacgtctgcgatg

SEQ ID NO: 15326 - DNA, 18 bp, synthetic construct
  source 1..18: mol_type = other DNA; mol_type = other DNA
gagtctgagtctgcgatg

SEQ ID NO: 15327 - DNA, 18 bp, synthetic construct
  source 1..18: mol_type = other DNA; mol_type = other DNA
gagtctgcatctgcgatg

SEQ ID NO: 15328 - DNA, 18 bp, synthetic construct
  source 1..18: mol_type = other DNA; mol_type = other DNA
gagtctgcgtatgcgatg

SEQ ID NO: 15329 - DNA, 18 bp, synthetic construct
  source 1..18: mol_type = other DNA; mol_type = other DNA
gagtctgcgtctacgatg

SEQ ID NO: 15330 - DNA, 18 bp, synthetic construct
  source 1..18: mol_type = other DNA; mol_type = other DNA
gagtctgcgtctgagatg

SEQ ID NO: 15331 - DNA, 18 bp, synthetic construct
  source 1..18: mol_type = other DNA; mol_type = other DNA
gagtctgcgtctgcaatg

SEQ ID NO: 15332 - DNA, 18 bp, synthetic construct
  source 1..18: mol_type = other DNA; mol_type = other DNA
agagtctgcgtctgcgat

SEQ ID NO: 15333 - DNA, 18 bp, synthetic construct
  source 1..18: mol_type = other DNA; mol_type = other DNA
gaagtctgcgtctgcgat

SEQ ID NO: 15334 - DNA, 18 bp, synthetic construct
  source 1..18: mol_type = other DNA; mol_type = other DNA
ggaatctgcgtctgcgat

SEQ ID NO: 15335 - DNA, 18 bp, synthetic construct
  source 1..18: mol_type = other DNA; mol_type = other DNA
ggagtatgcgtctgcgat

SEQ ID NO: 15336 - DNA, 18 bp, synthetic construct
  source 1..18: mol_type = other DNA; mol_type = other DNA
ggagtctacgtctgcgat

SEQ ID NO: 15337 - DNA, 18 bp, synthetic construct
  source 1..18: mol_type = other DNA; mol_type = other DNA
ggagtctgagtctgcgat

SEQ ID NO: 15338 - DNA, 18 bp, synthetic construct
  source 1..18: mol_type = other DNA; mol_type = other DNA
ggagtctgcatctgcgat

SEQ ID NO: 15339 - DNA, 18 bp, synthetic construct
  source 1..18: mol_type = other DNA; mol_type = other DNA
ggagtctgcgtatgcgat

SEQ ID NO: 15340 - DNA, 18 bp, synthetic construct
  source 1..18: mol_type = other DNA; mol_type = other DNA
ggagtctgcgtctacgat

SEQ ID NO: 15341 - DNA, 18 bp, synthetic construct
  source 1..18: mol_type = other DNA; mol_type = other DNA
ggagtctgcgtctgagat

SEQ ID NO: 15342 - DNA, 18 bp, synthetic construct
  source 1..18: mol_type = other DNA; mol_type = other DNA
tagagtctgcgtctgcga

SEQ ID NO: 15343 - DNA, 18 bp, synthetic construct
  source 1..18: mol_type = other DNA; mol_type = other DNA
tgaagtctgcgtctgcga

SEQ ID NO: 15344 - DNA, 18 bp, synthetic construct
  source 1..18: mol_type = other DNA; mol_type = other DNA
tggaatctgcgtctgcga

SEQ ID NO: 15345 - DNA, 18 bp, synthetic construct
  source 1..18: mol_type = other DNA; mol_type = other DNA
tggagtatgcgtctgcga

SEQ ID NO: 15346 - DNA, 18 bp, synthetic construct
  source 1..18: mol_type = other DNA; mol_type = other DNA
tggagtctacgtctgcga

SEQ ID NO: 15347 - DNA, 18 bp, synthetic construct
  source 1..18: mol_type = other DNA; mol_type = other DNA
tggagtctgagtctgcga

SEQ ID NO: 15348 - DNA, 18 bp, synthetic construct
  source 1..18: mol_type = other DNA; mol_type = other DNA
tggagtctgcatctgcga

SEQ ID NO: 15349 - DNA, 18 bp, synthetic construct
  source 1..18: mol_type = other DNA; mol_type = other DNA
tggagtctgcgtatgcga

SEQ ID NO: 15350 - DNA, 18 bp, synthetic construct
  source 1..18: mol_type = other DNA; mol_type = other DNA
tggagtctgcgtctacga

SEQ ID NO: 15351 - DNA, 18 bp, synthetic construct
  source 1..18: mol_type = other DNA; mol_type = other DNA
tggagtctgcgtctgaga

SEQ ID NO: 15352 - DNA, 18 bp, synthetic construct
  source 1..18: mol_type = other DNA; mol_type = other DNA
atggagtctgcgtctgcg

SEQ ID NO: 15353 - DNA, 18 bp, synthetic construct
  source 1..18: mol_type = other DNA; mol_type = other DNA
ctagagtctgcgtctgcg

SEQ ID NO: 15354 - DNA, 18 bp, synthetic construct
  source 1..18: mol_type = other DNA; mol_type = other DNA
ctgaagtctgcgtctgcg

SEQ ID NO: 15355 - DNA, 18 bp, synthetic construct
  source 1..18: mol_type = other DNA; mol_type = other DNA
ctggaatctgcgtctgcg

SEQ ID NO: 15356 - DNA, 18 bp, synthetic construct
  source 1..18: mol_type = other DNA; mol_type = other DNA
ctggagtatgcgtctgcg

SEQ ID NO: 15357 - DNA, 18 bp, synthetic construct
  source 1..18: mol_type = other DNA; mol_type = other DNA
ctggagtctacgtctgcg

SEQ ID NO: 15358 - DNA, 18 bp, synthetic construct
  source 1..18: mol_type = other DNA; mol_type = other DNA
ctggagtctgagtctgcg

SEQ ID NO: 15359 - DNA, 18 bp, synthetic construct
  source 1..18: mol_type = other DNA; mol_type = other DNA
ctggagtctgcatctgcg

SEQ ID NO: 15360 - DNA, 18 bp, synthetic construct
  source 1..18: mol_type = other DNA; mol_type = other DNA
ctggagtctgcgtatgcg

SEQ ID NO: 15361 - DNA, 18 bp, synthetic construct
  source 1..18: mol_type = other DNA; mol_type = other DNA
ctggagtctgcgtctacg

SEQ ID NO: 15362 - DNA, 18 bp, synthetic construct
  source 1..18: mol_type = other DNA; mol_type = other DNA
ctggagtctgcgtctgag

SEQ ID NO: 15363 - DNA, 18 bp, synthetic construct
  source 1..18: mol_type = other DNA; mol_type = other DNA
tatggagtctgcgtctgc

SEQ ID NO: 15364 - DNA, 18 bp, synthetic construct
  source 1..18: mol_type = other DNA; mol_type = other DNA
tctagagtctgcgtctgc

SEQ ID NO: 15365 - DNA, 18 bp, synthetic construct
  source 1..18: mol_type = other DNA; mol_type = other DNA
tctgaagtctgcgtctgc

SEQ ID NO: 15366 - DNA, 18 bp, synthetic construct
  source 1..18: mol_type = other DNA; mol_type = other DNA
tctggaatctgcgtctgc

SEQ ID NO: 15367 - DNA, 18 bp, synthetic construct
  source 1..18: mol_type = other DNA; mol_type = other DNA
tctggagtatgcgtctgc

SEQ ID NO: 15368 - DNA, 18 bp, synthetic construct
  source 1..18: mol_type = other DNA; mol_type = other DNA
tctggagtctacgtctgc

SEQ ID NO: 15369 - DNA, 18 bp, synthetic construct
  source 1..18: mol_type = other DNA; mol_type = other DNA
tctggagtctgagtctgc

SEQ ID NO: 15370 - DNA, 18 bp, synthetic construct
  source 1..18: mol_type = other DNA; mol_type = other DNA
tctggagtctgcatctgc

SEQ ID NO: 15371 - DNA, 18 bp, synthetic construct
  source 1..18: mol_type = other DNA; mol_type = other DNA
tctggagtctgcgtatgc

SEQ ID NO: 15372 - DNA, 18 bp, synthetic construct
  source 1..18: mol_type = other DNA; mol_type = other DNA
tctggagtctgcgtctga

SEQ ID NO: 15373 - DNA, 18 bp, synthetic construct
  source 1..18: mol_type = other DNA; mol_type = other DNA
atctggagtctgcgtctg

SEQ ID NO: 15374 - DNA, 18 bp, synthetic construct
  source 1..18: mol_type = other DNA; mol_type = other DNA
ctatggagtctgcgtctg

SEQ ID NO: 15375 - DNA, 18 bp, synthetic construct
  source 1..18: mol_type = other DNA; mol_type = other DNA
ctctagagtctgcgtctg

SEQ ID NO: 15376 - DNA, 18 bp, synthetic construct
  source 1..18: mol_type = other DNA; mol_type = other DNA
ctctgaagtctgcgtctg

SEQ ID NO: 15377 - DNA, 18 bp, synthetic construct
  source 1..18: mol_type = other DNA; mol_type = other DNA
ctctggaatctgcgtctg

SEQ ID NO: 15378 - DNA, 18 bp, synthetic construct
  source 1..18: mol_type = other DNA; mol_type = other DNA
ctctggagtatgcgtctg

SEQ ID NO: 15379 - DNA, 18 bp, synthetic construct
  source 1..18: mol_type = other DNA; mol_type = other DNA
ctctggagtctacgtctg

SEQ ID NO: 15380 - DNA, 18 bp, synthetic construct
  source 1..18: mol_type = other DNA; mol_type = other DNA
ctctggagtctgagtctg

SEQ ID NO: 15381 - DNA, 18 bp, synthetic construct
  source 1..18: mol_type = other DNA; mol_type = other DNA
ctctggagtctgcatctg

SEQ ID NO: 15382 - DNA, 18 bp, synthetic construct
  source 1..18: mol_type = other DNA; mol_type = other DNA
ctctggagtctgcgtatg

SEQ ID NO: 15383 - DNA, 18 bp, synthetic construct
  source 1..18: mol_type = other DNA; mol_type = other DNA
actctggagtctgcgtct

SEQ ID NO: 15384 - DNA, 18 bp, synthetic construct
  source 1..18: mol_type = other DNA; mol_type = other DNA
gatctggagtctgcgtct

SEQ ID NO: 15385 - DNA, 18 bp, synthetic construct
  source 1..18: mol_type = other DNA; mol_type = other DNA
gctatggagtctgcgtct

SEQ ID NO: 15386 - DNA, 18 bp, synthetic construct
  source 1..18: mol_type = other DNA; mol_type = other DNA
gctctagagtctgcgtct

SEQ ID NO: 15387 - DNA, 18 bp, synthetic construct
  source 1..18: mol_type = other DNA; mol_type = other DNA
gctctgaagtctgcgtct

SEQ ID NO: 15388 - DNA, 18 bp, synthetic construct
  source 1..18: mol_type = other DNA; mol_type = other DNA
gctctggaatctgcgtct

SEQ ID NO: 15389 - DNA, 18 bp, synthetic construct
  source 1..18: mol_type = other DNA; mol_type = other DNA
gctctggagtatgcgtct

SEQ ID NO: 15390 - DNA, 18 bp, synthetic construct
  source 1..18: mol_type = other DNA; mol_type = other DNA
gctctggagtctacgtct

SEQ ID NO: 15391 - DNA, 18 bp, synthetic construct
  source 1..18: mol_type = other DNA; mol_type = other DNA
gctctggagtctgagtct

SEQ ID NO: 15392 - DNA, 18 bp, synthetic construct
  source 1..18: mol_type = other DNA; mol_type = other DNA
gctctggagtctgcgtat

SEQ ID NO: 15393 - DNA, 18 bp, synthetic construct
  source 1..18: mol_type = other DNA; mol_type = other DNA
agctctggagtctgcgtc

SEQ ID NO: 15394 - DNA, 18 bp, synthetic construct
  source 1..18: mol_type = other DNA; mol_type = other DNA
gactctggagtctgcgtc

SEQ ID NO: 15395 - DNA, 18 bp, synthetic construct
  source 1..18: mol_type = other DNA; mol_type = other DNA
ggatctggagtctgcgtc

SEQ ID NO: 15396 - DNA, 18 bp, synthetic construct
  source 1..18: mol_type = other DNA; mol_type = other DNA
ggctatggagtctgcgtc

SEQ ID NO: 15397 - DNA, 18 bp, synthetic construct
  source 1..18: mol_type = other DNA; mol_type = other DNA
ggctctagagtctgcgtc

SEQ ID NO: 15398 - DNA, 18 bp, synthetic construct
  source 1..18: mol_type = other DNA; mol_type = other DNA
ggctctgaagtctgcgtc

SEQ ID NO: 15399 - DNA, 18 bp, synthetic construct
  source 1..18: mol_type = other DNA; mol_type = other DNA
ggctctggaatctgcgtc

SEQ ID NO: 15400 - DNA, 18 bp, synthetic construct
  source 1..18: mol_type = other DNA; mol_type = other DNA
ggctctggagtatgcgtc

SEQ ID NO: 15401 - DNA, 18 bp, synthetic construct
  source 1..18: mol_type = other DNA; mol_type = other DNA
ggctctggagtctacgtc

SEQ ID NO: 15402 - DNA, 18 bp, synthetic construct
  source 1..18: mol_type = other DNA; mol_type = other DNA
ggctctggagtctgagtc

SEQ ID NO: 15403 - DNA, 18 bp, synthetic construct
  source 1..18: mol_type = other DNA; mol_type = other DNA
ggctctggagtctgcgta

SEQ ID NO: 15404 - DNA, 18 bp, synthetic construct
  source 1..18: mol_type = other DNA; mol_type = other DNA
aggctctggagtctgcgt

SEQ ID NO: 15405 - DNA, 18 bp, synthetic construct
  source 1..18: mol_type = other DNA; mol_type = other DNA
cagctctggagtctgcgt

SEQ ID NO: 15406 - DNA, 18 bp, synthetic construct
  source 1..18: mol_type = other DNA; mol_type = other DNA
cgactctggagtctgcgt

SEQ ID NO: 15407 - DNA, 18 bp, synthetic construct
  source 1..18: mol_type = other DNA; mol_type = other DNA
cggatctggagtctgcgt

SEQ ID NO: 15408 - DNA, 18 bp, synthetic construct
  source 1..18: mol_type = other DNA; mol_type = other DNA
cggctatggagtctgcgt

SEQ ID NO: 15409 - DNA, 18 bp, synthetic construct
  source 1..18: mol_type = other DNA; mol_type = other DNA
cggctctagagtctgcgt

SEQ ID NO: 15410 - DNA, 18 bp, synthetic construct
  source 1..18: mol_type = other DNA; mol_type = other DNA
cggctctgaagtctgcgt

SEQ ID NO: 15411 - DNA, 18 bp, synthetic construct
  source 1..18: mol_type = other DNA; mol_type = other DNA
cggctctggaatctgcgt

SEQ ID NO: 15412 - DNA, 18 bp, synthetic construct
  source 1..18: mol_type = other DNA; mol_type = other DNA
cggctctggagtatgcgt

SEQ ID NO: 15413 - DNA, 18 bp, synthetic construct
  source 1..18: mol_type = other DNA; mol_type = other DNA
cggctctggagtctacgt

SEQ ID NO: 15414 - DNA, 18 bp, synthetic construct
  source 1..18: mol_type = other DNA; mol_type = other DNA
cggctctggagtctgagt

SEQ ID NO: 15415 - DNA, 25 bp, synthetic construct
  source 1..25: mol_type = other DNA; mol_type = other DNA
aaggctccatctcagctgcctaggc

SEQ ID NO: 15416 - DNA, 25 bp, synthetic construct
  source 1..25: mol_type = other DNA; mol_type = other DNA
aaggctccatctcagctgcctgagc

SEQ ID NO: 15417 - DNA, 25 bp, synthetic construct
  source 1..25: mol_type = other DNA; mol_type = other DNA
aaggctccatctcagctgcctggac

SEQ ID NO: 15418 - DNA, 25 bp, synthetic construct
  source 1..25: mol_type = other DNA; mol_type = other DNA
gaagctccatctcagctgcctaggc

SEQ ID NO: 15419 - DNA, 25 bp, synthetic construct
  source 1..25: mol_type = other DNA; mol_type = other DNA
gaagctccatctcagctgcctgagc

SEQ ID NO: 15420 - DNA, 25 bp, synthetic construct
  source 1..25: mol_type = other DNA; mol_type = other DNA
gaagctccatctcagctgcctggac

SEQ ID NO: 15421 - DNA, 25 bp, synthetic construct
  source 1..25: mol_type = other DNA; mol_type = other DNA
gagactccatctcagctgcctaggc

SEQ ID NO: 15422 - DNA, 25 bp, synthetic construct
  source 1..25: mol_type = other DNA; mol_type = other DNA
gagactccatctcagctgcctgagc

SEQ ID NO: 15423 - DNA, 25 bp, synthetic construct
  source 1..25: mol_type = other DNA; mol_type = other DNA
gagactccatctcagctgcctggac

SEQ ID NO: 15424 - DNA, 25 bp, synthetic construct
  source 1..25: mol_type = other DNA; mol_type = other DNA
gaggctccatctcaactgcctaggc

SEQ ID NO: 15425 - DNA, 25 bp, synthetic construct
  source 1..25: mol_type = other DNA; mol_type = other DNA
gaggctccatctcaactgcctgagc

SEQ ID NO: 15426 - DNA, 25 bp, synthetic construct
  source 1..25: mol_type = other DNA; mol_type = other DNA
gaggctccatctcaactgcctggac

SEQ ID NO: 15427 - DNA, 25 bp, synthetic construct
  source 1..25: mol_type = other DNA; mol_type = other DNA
gaggctccatctcagctacctaggc

SEQ ID NO: 15428 - DNA, 25 bp, synthetic construct
  source 1..25: mol_type = other DNA; mol_type = other DNA
gaggctccatctcagctacctgagc

SEQ ID NO: 15429 - DNA, 25 bp, synthetic construct
  source 1..25: mol_type = other DNA; mol_type = other DNA
gaggctccatctcagctacctggac

SEQ ID NO: 15430 - DNA, 25 bp, synthetic construct
  source 1..25: mol_type = other DNA; mol_type = other DNA
gaggctccatctcagctgcctaagc

SEQ ID NO: 15431 - DNA, 25 bp, synthetic construct
  source 1..25: mol_type = other DNA; mol_type = other DNA
gaggctccatctcagctgcctagac

SEQ ID NO: 15432 - DNA, 25 bp, synthetic construct
  source 1..25: mol_type = other DNA; mol_type = other DNA
agaggctccatctcagctgcctagg

SEQ ID NO: 15433 - DNA, 25 bp, synthetic construct
  source 1..25: mol_type = other DNA; mol_type = other DNA
agaggctccatctcagctgcctgag

SEQ ID NO: 15434 - DNA, 25 bp, synthetic construct
  source 1..25: mol_type = other DNA; mol_type = other DNA
agaggctccatctcagctgcctgga

SEQ ID NO: 15435 - DNA, 25 bp, synthetic construct
  source 1..25: mol_type = other DNA; mol_type = other DNA
gaaggctccatctcagctgcctagg

SEQ ID NO: 15436 - DNA, 25 bp, synthetic construct
  source 1..25: mol_type = other DNA; mol_type = other DNA
gaaggctccatctcagctgcctgag

SEQ ID NO: 15437 - DNA, 25 bp, synthetic construct
  source 1..25: mol_type = other DNA; mol_type = other DNA
gaaggctccatctcagctgcctgga

SEQ ID NO: 15438 - DNA, 25 bp, synthetic construct
  source 1..25: mol_type = other DNA; mol_type = other DNA
ggaagctccatctcagctgcctagg

SEQ ID NO: 15439 - DNA, 25 bp, synthetic construct
  source 1..25: mol_type = other DNA; mol_type = other DNA
ggaagctccatctcagctgcctgag

SEQ ID NO: 15440 - DNA, 25 bp, synthetic construct
  source 1..25: mol_type = other DNA; mol_type = other DNA
ggaagctccatctcagctgcctgga

SEQ ID NO: 15441 - DNA, 25 bp, synthetic construct
  source 1..25: mol_type = other DNA; mol_type = other DNA
ggagactccatctcagctgcctagg

SEQ ID NO: 15442 - DNA, 25 bp, synthetic construct
  source 1..25: mol_type = other DNA; mol_type = other DNA
ggagactccatctcagctgcctgag

SEQ ID NO: 15443 - DNA, 25 bp, synthetic construct
  source 1..25: mol_type = other DNA; mol_type = other DNA
ggagactccatctcagctgcctgga

SEQ ID NO: 15444 - DNA, 25 bp, synthetic construct
  source 1..25: mol_type = other DNA; mol_type = other DNA
ggaggctccatctcaactgcctagg

SEQ ID NO: 15445 - DNA, 25 bp, synthetic construct
  source 1..25: mol_type = other DNA; mol_type = other DNA
ggaggctccatctcaactgcctgag

SEQ ID NO: 15446 - DNA, 25 bp, synthetic construct
  source 1..25: mol_type = other DNA; mol_type = other DNA
ggaggctccatctcaactgcctgga

SEQ ID NO: 15447 - DNA, 25 bp, synthetic construct
  source 1..25: mol_type = other DNA; mol_type = other DNA
ggaggctccatctcagctacctagg

SEQ ID NO: 15448 - DNA, 25 bp, synthetic construct
  source 1..25: mol_type = other DNA; mol_type = other DNA
ggaggctccatctcagctacctgag

SEQ ID NO: 15449 - DNA, 25 bp, synthetic construct
  source 1..25: mol_type = other DNA; mol_type = other DNA
ggaggctccatctcagctacctgga

SEQ ID NO: 15450 - DNA, 25 bp, synthetic construct
  source 1..25: mol_type = other DNA; mol_type = other DNA
ggaggctccatctcagctgcctaag

SEQ ID NO: 15451 - DNA, 25 bp, synthetic construct
  source 1..25: mol_type = other DNA; mol_type = other DNA
ggaggctccatctcagctgcctaga

SEQ ID NO: 15452 - DNA, 25 bp, synthetic construct
  source 1..25: mol_type = other DNA; mol_type = other DNA
aaaaggctccatctcagctgcctgg

SEQ ID NO: 15453 - DNA, 25 bp, synthetic construct
  source 1..25: mol_type = other DNA; mol_type = other DNA
aagaagctccatctcagctgcctgg

SEQ ID NO: 15454 - DNA, 25 bp, synthetic construct
  source 1..25: mol_type = other DNA; mol_type = other DNA
aagagactccatctcagctgcctgg

SEQ ID NO: 15455 - DNA, 25 bp, synthetic construct
  source 1..25: mol_type = other DNA; mol_type = other DNA
aagaggctccatctcaactgcctgg

SEQ ID NO: 15456 - DNA, 25 bp, synthetic construct
  source 1..25: mol_type = other DNA; mol_type = other DNA
aagaggctccatctcagctacctgg

SEQ ID NO: 15457 - DNA, 25 bp, synthetic construct
  source 1..25: mol_type = other DNA; mol_type = other DNA
aagaggctccatctcagctgcctag

SEQ ID NO: 15458 - DNA, 25 bp, synthetic construct
  source 1..25: mol_type = other DNA; mol_type = other DNA
aagaggctccatctcagctgcctga

SEQ ID NO: 15459 - DNA, 25 bp, synthetic construct
  source 1..25: mol_type = other DNA; mol_type = other DNA
agaaagctccatctcagctgcctgg

SEQ ID NO: 15460 - DNA, 25 bp, synthetic construct
  source 1..25: mol_type = other DNA; mol_type = other DNA
agaagactccatctcagctgcctgg

SEQ ID NO: 15461 - DNA, 25 bp, synthetic construct
  source 1..25: mol_type = other DNA; mol_type = other DNA
agaaggctccatctcaactgcctgg

SEQ ID NO: 15462 - DNA, 25 bp, synthetic construct
  source 1..25: mol_type = other DNA; mol_type = other DNA
agaaggctccatctcagctacctgg

SEQ ID NO: 15463 - DNA, 25 bp, synthetic construct
  source 1..25: mol_type = other DNA; mol_type = other DNA
agaaggctccatctcagctgcctag

SEQ ID NO: 15464 - DNA, 25 bp, synthetic construct
  source 1..25: mol_type = other DNA; mol_type = other DNA
agaaggctccatctcagctgcctga

SEQ ID NO: 15465 - DNA, 25 bp, synthetic construct
  source 1..25: mol_type = other DNA; mol_type = other DNA
aggaaactccatctcagctgcctgg

SEQ ID NO: 15466 - DNA, 25 bp, synthetic construct
  source 1..25: mol_type = other DNA; mol_type = other DNA
aggaagctccatctcaactgcctgg

SEQ ID NO: 15467 - DNA, 25 bp, synthetic construct
  source 1..25: mol_type = other DNA; mol_type = other DNA
aggaagctccatctcagctacctgg

SEQ ID NO: 15468 - DNA, 25 bp, synthetic construct
  source 1..25: mol_type = other DNA; mol_type = other DNA
aggaagctccatctcagctgcctag

SEQ ID NO: 15469 - DNA, 25 bp, synthetic construct
  source 1..25: mol_type = other DNA; mol_type = other DNA
aggaagctccatctcagctgcctga

SEQ ID NO: 15470 - DNA, 25 bp, synthetic construct
  source 1..25: mol_type = other DNA; mol_type = other DNA
aggagactccatctcaactgcctgg

SEQ ID NO: 15471 - DNA, 25 bp, synthetic construct
  source 1..25: mol_type = other DNA; mol_type = other DNA
aggagactccatctcagctacctgg

SEQ ID NO: 15472 - DNA, 25 bp, synthetic construct
  source 1..25: mol_type = other DNA; mol_type = other DNA
aggagactccatctcagctgcctag

SEQ ID NO: 15473 - DNA, 25 bp, synthetic construct
  source 1..25: mol_type = other DNA; mol_type = other DNA
aggagactccatctcagctgcctga

SEQ ID NO: 15474 - DNA, 25 bp, synthetic construct
  source 1..25: mol_type = other DNA; mol_type = other DNA
aggaggctccatctcaactacctgg

SEQ ID NO: 15475 - DNA, 25 bp, synthetic construct
  source 1..25: mol_type = other DNA; mol_type = other DNA
aggaggctccatctcaactgcctag

SEQ ID NO: 15476 - DNA, 25 bp, synthetic construct
  source 1..25: mol_type = other DNA; mol_type = other DNA
aggaggctccatctcaactgcctga

SEQ ID NO: 15477 - DNA, 25 bp, synthetic construct
  source 1..25: mol_type = other DNA; mol_type = other DNA
aggaggctccatctcagctacctag

SEQ ID NO: 15478 - DNA, 25 bp, synthetic construct
  source 1..25: mol_type = other DNA; mol_type = other DNA
aggaggctccatctcagctacctga

SEQ ID NO: 15479 - DNA, 25 bp, synthetic construct
  source 1..25: mol_type = other DNA; mol_type = other DNA
aaaaaggctccatctcagctgcctg

SEQ ID NO: 15480 - DNA, 25 bp, synthetic construct
  source 1..25: mol_type = other DNA; mol_type = other DNA
aaagaagctccatctcagctgcctg

SEQ ID NO: 15481 - DNA, 25 bp, synthetic construct
  source 1..25: mol_type = other DNA; mol_type = other DNA
aaagagactccatctcagctgcctg

SEQ ID NO: 15482 - DNA, 25 bp, synthetic construct
  source 1..25: mol_type = other DNA; mol_type = other DNA
aaagaggctccatctcaactgcctg

SEQ ID NO: 15483 - DNA, 25 bp, synthetic construct
  source 1..25: mol_type = other DNA; mol_type = other DNA
aaagaggctccatctcagctacctg

SEQ ID NO: 15484 - DNA, 25 bp, synthetic construct
  source 1..25: mol_type = other DNA; mol_type = other DNA
aaagaggctccatctcagctgccta

SEQ ID NO: 15485 - DNA, 25 bp, synthetic construct
  source 1..25: mol_type = other DNA; mol_type = other DNA
aagaaagctccatctcagctgcctg

SEQ ID NO: 15486 - DNA, 25 bp, synthetic construct
  source 1..25: mol_type = other DNA; mol_type = other DNA
aagaagactccatctcagctgcctg

SEQ ID NO: 15487 - DNA, 25 bp, synthetic construct
  source 1..25: mol_type = other DNA; mol_type = other DNA
aagaaggctccatctcaactgcctg

SEQ ID NO: 15488 - DNA, 25 bp, synthetic construct
  source 1..25: mol_type = other DNA; mol_type = other DNA
aagaaggctccatctcagctacctg

SEQ ID NO: 15489 - DNA, 25 bp, synthetic construct
  source 1..25: mol_type = other DNA; mol_type = other DNA
aagaaggctccatctcagctgccta

SEQ ID NO: 15490 - DNA, 25 bp, synthetic construct
  source 1..25: mol_type = other DNA; mol_type = other DNA
aaggaaactccatctcagctgcctg

SEQ ID NO: 15491 - DNA, 25 bp, synthetic construct
  source 1..25: mol_type = other DNA; mol_type = other DNA
aaggaagctccatctcaactgcctg

SEQ ID NO: 15492 - DNA, 25 bp, synthetic construct
  source 1..25: mol_type = other DNA; mol_type = other DNA
aaggaagctccatctcagctacctg

SEQ ID NO: 15493 - DNA, 25 bp, synthetic construct
  source 1..25: mol_type = other DNA; mol_type = other DNA
aaggaagctccatctcagctgccta

SEQ ID NO: 15494 - DNA, 25 bp, synthetic construct
  source 1..25: mol_type = other DNA; mol_type = other DNA
aaggagactccatctcaactgcctg

SEQ ID NO: 15495 - DNA, 25 bp, synthetic construct
  source 1..25: mol_type = other DNA; mol_type = other DNA
aaggagactccatctcagctacctg

SEQ ID NO: 15496 - DNA, 25 bp, synthetic construct
  source 1..25: mol_type = other DNA; mol_type = other DNA
aaggagactccatctcagctgccta

SEQ ID NO: 15497 - DNA, 25 bp, synthetic construct
  source 1..25: mol_type = other DNA; mol_type = other DNA
aaggaggctccatctcaactacctg

SEQ ID NO: 15498 - DNA, 25 bp, synthetic construct
  source 1..25: mol_type = other DNA; mol_type = other DNA
aaggaggctccatctcaactgccta

SEQ ID NO: 15499 - DNA, 25 bp, synthetic construct
  source 1..25: mol_type = other DNA; mol_type = other DNA
caaaaaggctccatctcagctgcct

SEQ ID NO: 15500 - DNA, 25 bp, synthetic construct
  source 1..25: mol_type = other DNA; mol_type = other DNA
caaagaagctccatctcagctgcct

SEQ ID NO: 15501 - DNA, 25 bp, synthetic construct
  source 1..25: mol_type = other DNA; mol_type = other DNA
caaagagactccatctcagctgcct

SEQ ID NO: 15502 - DNA, 25 bp, synthetic construct
  source 1..25: mol_type = other DNA; mol_type = other DNA
caaagaggctccatctcaactgcct

SEQ ID NO: 15503 - DNA, 25 bp, synthetic construct
  source 1..25: mol_type = other DNA; mol_type = other DNA
caaagaggctccatctcagctacct

SEQ ID NO: 15504 - DNA, 25 bp, synthetic construct
  source 1..25: mol_type = other DNA; mol_type = other DNA
caagaaagctccatctcagctgcct

SEQ ID NO: 15505 - DNA, 25 bp, synthetic construct
  source 1..25: mol_type = other DNA; mol_type = other DNA
caagaagactccatctcagctgcct

SEQ ID NO: 15506 - DNA, 25 bp, synthetic construct
  source 1..25: mol_type = other DNA; mol_type = other DNA
caagaaggctccatctcaactgcct

SEQ ID NO: 15507 - DNA, 25 bp, synthetic construct
  source 1..25: mol_type = other DNA; mol_type = other DNA
caagaaggctccatctcagctacct

SEQ ID NO: 15508 - DNA, 25 bp, synthetic construct
  source 1..25: mol_type = other DNA; mol_type = other DNA
caaggaaactccatctcagctgcct

SEQ ID NO: 15509 - DNA, 25 bp, synthetic construct
  source 1..25: mol_type = other DNA; mol_type = other DNA
caaggaagctccatctcaactgcct

SEQ ID NO: 15510 - DNA, 25 bp, synthetic construct
  source 1..25: mol_type = other DNA; mol_type = other DNA
caaggaagctccatctcagctacct

SEQ ID NO: 15511 - DNA, 25 bp, synthetic construct
  source 1..25: mol_type = other DNA; mol_type = other DNA
caaggagactccatctcaactgcct

SEQ ID NO: 15512 - DNA, 25 bp, synthetic construct
  source 1..25: mol_type = other DNA; mol_type = other DNA
caaggagactccatctcagctacct

SEQ ID NO: 15513 - DNA, 25 bp, synthetic construct
  source 1..25: mol_type = other DNA; mol_type = other DNA
acaaagaggctccatctcagctgcc

SEQ ID NO: 15514 - DNA, 25 bp, synthetic construct
  source 1..25: mol_type = other DNA; mol_type = other DNA
acaagaaggctccatctcagctgcc

SEQ ID NO: 15515 - DNA, 25 bp, synthetic construct
  source 1..25: mol_type = other DNA; mol_type = other DNA
acaaggaagctccatctcagctgcc

SEQ ID NO: 15516 - DNA, 25 bp, synthetic construct
  source 1..25: mol_type = other DNA; mol_type = other DNA
acaaggagactccatctcagctgcc

SEQ ID NO: 15517 - DNA, 25 bp, synthetic construct
  source 1..25: mol_type = other DNA; mol_type = other DNA
acaaggaggctccatctcaactgcc

SEQ ID NO: 15518 - DNA, 25 bp, synthetic construct
  source 1..25: mol_type = other DNA; mol_type = other DNA
acaaggaggctccatctcagctacc

SEQ ID NO: 15519 - DNA, 25 bp, synthetic construct
  source 1..25: mol_type = other DNA; mol_type = other DNA
gcaaaaaggctccatctcagctgcc

SEQ ID NO: 15520 - DNA, 25 bp, synthetic construct
  source 1..25: mol_type = other DNA; mol_type = other DNA
gcaaagaagctccatctcagctgcc

SEQ ID NO: 15521 - DNA, 25 bp, synthetic construct
  source 1..25: mol_type = other DNA; mol_type = other DNA
gcaaagagactccatctcagctgcc

SEQ ID NO: 15522 - DNA, 25 bp, synthetic construct
  source 1..25: mol_type = other DNA; mol_type = other DNA
gcaaagaggctccatctcaactgcc

SEQ ID NO: 15523 - DNA, 25 bp, synthetic construct
  source 1..25: mol_type = other DNA; mol_type = other DNA
gcaaagaggctccatctcagctacc

SEQ ID NO: 15524 - DNA, 25 bp, synthetic construct
  source 1..25: mol_type = other DNA; mol_type = other DNA
gcaagaaagctccatctcagctgcc

SEQ ID NO: 15525 - DNA, 25 bp, synthetic construct
  source 1..25: mol_type = other DNA; mol_type = other DNA
gcaagaagactccatctcagctgcc

SEQ ID NO: 15526 - DNA, 25 bp, synthetic construct
  source 1..25: mol_type = other DNA; mol_type = other DNA
gcaagaaggctccatctcaactgcc

SEQ ID NO: 15527 - DNA, 25 bp, synthetic construct
  source 1..25: mol_type = other DNA; mol_type = other DNA
gcaagaaggctccatctcagctacc

SEQ ID NO: 15528 - DNA, 25 bp, synthetic construct
  source 1..25: mol_type = other DNA; mol_type = other DNA
gcaaggaaactccatctcagctgcc

SEQ ID NO: 15529 - DNA, 25 bp, synthetic construct
  source 1..25: mol_type = other DNA; mol_type = other DNA
gcaaggaagctccatctcaactgcc

SEQ ID NO: 15530 - DNA, 25 bp, synthetic construct
  source 1..25: mol_type = other DNA; mol_type = other DNA
gcaaggaagctccatctcagctacc

SEQ ID NO: 15531 - DNA, 25 bp, synthetic construct
  source 1..25: mol_type = other DNA; mol_type = other DNA
gcaaggagactccatctcaactgcc

SEQ ID NO: 15532 - DNA, 25 bp, synthetic construct
  source 1..25: mol_type = other DNA; mol_type = other DNA
gcaaggagactccatctcagctacc

SEQ ID NO: 15533 - DNA, 25 bp, synthetic construct
  source 1..25: mol_type = other DNA; mol_type = other DNA
aacaaagaggctccatctcagctgc

SEQ ID NO: 15534 - DNA, 25 bp, synthetic construct
  source 1..25: mol_type = other DNA; mol_type = other DNA
aacaagaaggctccatctcagctgc

SEQ ID NO: 15535 - DNA, 25 bp, synthetic construct
  source 1..25: mol_type = other DNA; mol_type = other DNA
aacaaggaagctccatctcagctgc

SEQ ID NO: 15536 - DNA, 25 bp, synthetic construct
  source 1..25: mol_type = other DNA; mol_type = other DNA
aacaaggagactccatctcagctgc

SEQ ID NO: 15537 - DNA, 25 bp, synthetic construct
  source 1..25: mol_type = other DNA; mol_type = other DNA
aacaaggaggctccatctcaactgc

SEQ ID NO: 15538 - DNA, 25 bp, synthetic construct
  source 1..25: mol_type = other DNA; mol_type = other DNA
aacaaggaggctccatctcagctac

SEQ ID NO: 15539 - DNA, 25 bp, synthetic construct
  source 1..25: mol_type = other DNA; mol_type = other DNA
agcaaaaaggctccatctcagctgc

SEQ ID NO: 15540 - DNA, 25 bp, synthetic construct
  source 1..25: mol_type = other DNA; mol_type = other DNA
agcaaagaagctccatctcagctgc

SEQ ID NO: 15541 - DNA, 25 bp, synthetic construct
  source 1..25: mol_type = other DNA; mol_type = other DNA
agcaaagagactccatctcagctgc

SEQ ID NO: 15542 - DNA, 25 bp, synthetic construct
  source 1..25: mol_type = other DNA; mol_type = other DNA
agcaaagaggctccatctcaactgc

SEQ ID NO: 15543 - DNA, 25 bp, synthetic construct
  source 1..25: mol_type = other DNA; mol_type = other DNA
agcaaagaggctccatctcagctac

SEQ ID NO: 15544 - DNA, 25 bp, synthetic construct
  source 1..25: mol_type = other DNA; mol_type = other DNA
agcaagaaagctccatctcagctgc

SEQ ID NO: 15545 - DNA, 25 bp, synthetic construct
  source 1..25: mol_type = other DNA; mol_type = other DNA
agcaagaagactccatctcagctgc

SEQ ID NO: 15546 - DNA, 25 bp, synthetic construct
  source 1..25: mol_type = other DNA; mol_type = other DNA
agcaagaaggctccatctcaactgc

SEQ ID NO: 15547 - DNA, 25 bp, synthetic construct
  source 1..25: mol_type = other DNA; mol_type = other DNA
agcaagaaggctccatctcagctac

SEQ ID NO: 15548 - DNA, 25 bp, synthetic construct
  source 1..25: mol_type = other DNA; mol_type = other DNA
agcaaggaaactccatctcagctgc

SEQ ID NO: 15549 - DNA, 25 bp, synthetic construct
  source 1..25: mol_type = other DNA; mol_type = other DNA
agcaaggaagctccatctcaactgc

SEQ ID NO: 15550 - DNA, 25 bp, synthetic construct
  source 1..25: mol_type = other DNA; mol_type = other DNA
agcaaggaagctccatctcagctac

SEQ ID NO: 15551 - DNA, 25 bp, synthetic construct
  source 1..25: mol_type = other DNA; mol_type = other DNA
agcaaggagactccatctcaactgc

SEQ ID NO: 15552 - DNA, 25 bp, synthetic construct
  source 1..25: mol_type = other DNA; mol_type = other DNA
agcaaggagactccatctcagctac

SEQ ID NO: 15553 - DNA, 25 bp, synthetic construct
  source 1..25: mol_type = other DNA; mol_type = other DNA
caacaaagaggctccatctcagctg

SEQ ID NO: 15554 - DNA, 25 bp, synthetic construct
  source 1..25: mol_type = other DNA; mol_type = other DNA
caacaagaaggctccatctcagctg

SEQ ID NO: 15555 - DNA, 25 bp, synthetic construct
  source 1..25: mol_type = other DNA; mol_type = other DNA
caacaaggaagctccatctcagctg

SEQ ID NO: 15556 - DNA, 25 bp, synthetic construct
  source 1..25: mol_type = other DNA; mol_type = other DNA
caacaaggagactccatctcagctg

SEQ ID NO: 15557 - DNA, 25 bp, synthetic construct
  source 1..25: mol_type = other DNA; mol_type = other DNA
caacaaggaggctccatctcaactg

SEQ ID NO: 15558 - DNA, 25 bp, synthetic construct
  source 1..25: mol_type = other DNA; mol_type = other DNA
caacaaggaggctccatctcagcta

SEQ ID NO: 15559 - DNA, 25 bp, synthetic construct
  source 1..25: mol_type = other DNA; mol_type = other DNA
cagcaaaaaggctccatctcagctg

SEQ ID NO: 15560 - DNA, 25 bp, synthetic construct
  source 1..25: mol_type = other DNA; mol_type = other DNA
cagcaaagaagctccatctcagctg

SEQ ID NO: 15561 - DNA, 25 bp, synthetic construct
  source 1..25: mol_type = other DNA; mol_type = other DNA
cagcaaagagactccatctcagctg

SEQ ID NO: 15562 - DNA, 25 bp, synthetic construct
  source 1..25: mol_type = other DNA; mol_type = other DNA
cagcaaagaggctccatctcaactg

SEQ ID NO: 15563 - DNA, 25 bp, synthetic construct
  source 1..25: mol_type = other DNA; mol_type = other DNA
cagcaaagaggctccatctcagcta

SEQ ID NO: 15564 - DNA, 25 bp, synthetic construct
  source 1..25: mol_type = other DNA; mol_type = other DNA
cagcaagaaagctccatctcagctg

SEQ ID NO: 15565 - DNA, 25 bp, synthetic construct
  source 1..25: mol_type = other DNA; mol_type = other DNA
cagcaagaagactccatctcagctg

SEQ ID NO: 15566 - DNA, 25 bp, synthetic construct
  source 1..25: mol_type = other DNA; mol_type = other DNA
cagcaagaaggctccatctcaactg

SEQ ID NO: 15567 - DNA, 25 bp, synthetic construct
  source 1..25: mol_type = other DNA; mol_type = other DNA
cagcaagaaggctccatctcagcta

SEQ ID NO: 15568 - DNA, 25 bp, synthetic construct
  source 1..25: mol_type = other DNA; mol_type = other DNA
cagcaaggaaactccatctcagctg

SEQ ID NO: 15569 - DNA, 25 bp, synthetic construct
  source 1..25: mol_type = other DNA; mol_type = other DNA
cagcaaggaagctccatctcaactg

SEQ ID NO: 15570 - DNA, 25 bp, synthetic construct
  source 1..25: mol_type = other DNA; mol_type = other DNA
cagcaaggaagctccatctcagcta

SEQ ID NO: 15571 - DNA, 25 bp, synthetic construct
  source 1..25: mol_type = other DNA; mol_type = other DNA
cagcaaggagactccatctcaactg

SEQ ID NO: 15572 - DNA, 25 bp, synthetic construct
  source 1..25: mol_type = other DNA; mol_type = other DNA
cagcaaggagactccatctcagcta

SEQ ID NO: 15573 - DNA, 25 bp, synthetic construct
  source 1..25: mol_type = other DNA; mol_type = other DNA
acaacaaagaggctccatctcagct

SEQ ID NO: 15574 - DNA, 25 bp, synthetic construct
  source 1..25: mol_type = other DNA; mol_type = other DNA
acaacaagaaggctccatctcagct

SEQ ID NO: 15575 - DNA, 25 bp, synthetic construct
  source 1..25: mol_type = other DNA; mol_type = other DNA
acaacaaggaagctccatctcagct

SEQ ID NO: 15576 - DNA, 25 bp, synthetic construct
  source 1..25: mol_type = other DNA; mol_type = other DNA
acaacaaggagactccatctcagct

SEQ ID NO: 15577 - DNA, 25 bp, synthetic construct
  source 1..25: mol_type = other DNA; mol_type = other DNA
acaacaaggaggctccatctcaact

SEQ ID NO: 15578 - DNA, 25 bp, synthetic construct
  source 1..25: mol_type = other DNA; mol_type = other DNA
acagcaaaaaggctccatctcagct

SEQ ID NO: 15579 - DNA, 25 bp, synthetic construct
  source 1..25: mol_type = other DNA; mol_type = other DNA
acagcaaagaagctccatctcagct

SEQ ID NO: 15580 - DNA, 25 bp, synthetic construct
  source 1..25: mol_type = other DNA; mol_type = other DNA
acagcaaagagactccatctcagct

SEQ ID NO: 15581 - DNA, 25 bp, synthetic construct
  source 1..25: mol_type = other DNA; mol_type = other DNA
acagcaaagaggctccatctcaact

SEQ ID NO: 15582 - DNA, 25 bp, synthetic construct
  source 1..25: mol_type = other DNA; mol_type = other DNA
acagcaagaaagctccatctcagct

SEQ ID NO: 15583 - DNA, 25 bp, synthetic construct
  source 1..25: mol_type = other DNA; mol_type = other DNA
acagcaagaagactccatctcagct

SEQ ID NO: 15584 - DNA, 25 bp, synthetic construct
  source 1..25: mol_type = other DNA; mol_type = other DNA
acagcaagaaggctccatctcaact

SEQ ID NO: 15585 - DNA, 25 bp, synthetic construct
  source 1..25: mol_type = other DNA; mol_type = other DNA
acagcaaggaaactccatctcagct

SEQ ID NO: 15586 - DNA, 25 bp, synthetic construct
  source 1..25: mol_type = other DNA; mol_type = other DNA
acagcaaggaagctccatctcaact

SEQ ID NO: 15587 - DNA, 25 bp, synthetic construct
  source 1..25: mol_type = other DNA; mol_type = other DNA
cacaacaaagaggctccatctcagc

SEQ ID NO: 15588 - DNA, 25 bp, synthetic construct
  source 1..25: mol_type = other DNA; mol_type = other DNA
cacaacaagaaggctccatctcagc

SEQ ID NO: 15589 - DNA, 25 bp, synthetic construct
  source 1..25: mol_type = other DNA; mol_type = other DNA
cacaacaaggaagctccatctcagc

SEQ ID NO: 15590 - DNA, 25 bp, synthetic construct
  source 1..25: mol_type = other DNA; mol_type = other DNA
cacaacaaggagactccatctcagc

SEQ ID NO: 15591 - DNA, 25 bp, synthetic construct
  source 1..25: mol_type = other DNA; mol_type = other DNA
cacaacaaggaggctccatctcaac

SEQ ID NO: 15592 - DNA, 25 bp, synthetic construct
  source 1..25: mol_type = other DNA; mol_type = other DNA
cacagcaaaaaggctccatctcagc

SEQ ID NO: 15593 - DNA, 25 bp, synthetic construct
  source 1..25: mol_type = other DNA; mol_type = other DNA
cacagcaaagaagctccatctcagc

SEQ ID NO: 15594 - DNA, 25 bp, synthetic construct
  source 1..25: mol_type = other DNA; mol_type = other DNA
cacagcaaagagactccatctcagc

SEQ ID NO: 15595 - DNA, 25 bp, synthetic construct
  source 1..25: mol_type = other DNA; mol_type = other DNA
cacagcaaagaggctccatctcaac

SEQ ID NO: 15596 - DNA, 25 bp, synthetic construct
  source 1..25: mol_type = other DNA; mol_type = other DNA
cacagcaagaaagctccatctcagc

SEQ ID NO: 15597 - DNA, 25 bp, synthetic construct
  source 1..25: mol_type = other DNA; mol_type = other DNA
cacagcaagaagactccatctcagc

SEQ ID NO: 15598 - DNA, 25 bp, synthetic construct
  source 1..25: mol_type = other DNA; mol_type = other DNA
cacagcaagaaggctccatctcaac

SEQ ID NO: 15599 - DNA, 25 bp, synthetic construct
  source 1..25: mol_type = other DNA; mol_type = other DNA
cacagcaaggaaactccatctcagc

SEQ ID NO: 15600 - DNA, 25 bp, synthetic construct
  source 1..25: mol_type = other DNA; mol_type = other DNA
cacagcaaggaagctccatctcaac

SEQ ID NO: 15601 - DNA, 25 bp, synthetic construct
  source 1..25: mol_type = other DNA; mol_type = other DNA
acacaacaaggaggctccatctcag

SEQ ID NO: 15602 - DNA, 25 bp, synthetic construct
  source 1..25: mol_type = other DNA; mol_type = other DNA
acacagcaaagaggctccatctcag

SEQ ID NO: 15603 - DNA, 25 bp, synthetic construct
  source 1..25: mol_type = other DNA; mol_type = other DNA
acacagcaagaaggctccatctcag

SEQ ID NO: 15604 - DNA, 25 bp, synthetic construct
  source 1..25: mol_type = other DNA; mol_type = other DNA
acacagcaaggaagctccatctcag

SEQ ID NO: 15605 - DNA, 25 bp, synthetic construct
  source 1..25: mol_type = other DNA; mol_type = other DNA
acacagcaaggagactccatctcag

SEQ ID NO: 15606 - DNA, 25 bp, synthetic construct
  source 1..25: mol_type = other DNA; mol_type = other DNA
acacagcaaggaggctccatctcaa

SEQ ID NO: 15607 - DNA, 25 bp, synthetic construct
  source 1..25: mol_type = other DNA; mol_type = other DNA
gcacaacaaagaggctccatctcag

SEQ ID NO: 15608 - DNA, 25 bp, synthetic construct
  source 1..25: mol_type = other DNA; mol_type = other DNA
gcacaacaagaaggctccatctcag

SEQ ID NO: 15609 - DNA, 25 bp, synthetic construct
  source 1..25: mol_type = other DNA; mol_type = other DNA
gcacaacaaggaagctccatctcag

SEQ ID NO: 15610 - DNA, 25 bp, synthetic construct
  source 1..25: mol_type = other DNA; mol_type = other DNA
gcacaacaaggagactccatctcag

SEQ ID NO: 15611 - DNA, 25 bp, synthetic construct
  source 1..25: mol_type = other DNA; mol_type = other DNA
gcacaacaaggaggctccatctcaa

SEQ ID NO: 15612 - DNA, 25 bp, synthetic construct
  source 1..25: mol_type = other DNA; mol_type = other DNA
gcacagcaaaaaggctccatctcag

SEQ ID NO: 15613 - DNA, 25 bp, synthetic construct
  source 1..25: mol_type = other DNA; mol_type = other DNA
gcacagcaaagaagctccatctcag

SEQ ID NO: 15614 - DNA, 25 bp, synthetic construct
  source 1..25: mol_type = other DNA; mol_type = other DNA
gcacagcaaagagactccatctcag

SEQ ID NO: 15615 - DNA, 25 bp, synthetic construct
  source 1..25: mol_type = other DNA; mol_type = other DNA
gcacagcaaagaggctccatctcaa

SEQ ID NO: 15616 - DNA, 25 bp, synthetic construct
  source 1..25: mol_type = other DNA; mol_type = other DNA
gcacagcaagaaagctccatctcag

SEQ ID NO: 15617 - DNA, 25 bp, synthetic construct
  source 1..25: mol_type = other DNA; mol_type = other DNA
gcacagcaagaagactccatctcag

SEQ ID NO: 15618 - DNA, 25 bp, synthetic construct
  source 1..25: mol_type = other DNA; mol_type = other DNA
gcacagcaagaaggctccatctcaa

SEQ ID NO: 15619 - DNA, 25 bp, synthetic construct
  source 1..25: mol_type = other DNA; mol_type = other DNA
gcacagcaaggaaactccatctcag

SEQ ID NO: 15620 - DNA, 25 bp, synthetic construct
  source 1..25: mol_type = other DNA; mol_type = other DNA
gcacagcaaggaagctccatctcaa

SEQ ID NO: 15621 - DNA, 25 bp, synthetic construct
  source 1..25: mol_type = other DNA; mol_type = other DNA
tacacaacaaggaggctccatctca

SEQ ID NO: 15622 - DNA, 25 bp, synthetic construct
  source 1..25: mol_type = other DNA; mol_type = other DNA
tacacagcaaagaggctccatctca

SEQ ID NO: 15623 - DNA, 25 bp, synthetic construct
  source 1..25: mol_type = other DNA; mol_type = other DNA
tacacagcaagaaggctccatctca

SEQ ID NO: 15624 - DNA, 25 bp, synthetic construct
  source 1..25: mol_type = other DNA; mol_type = other DNA
tacacagcaaggaagctccatctca

SEQ ID NO: 15625 - DNA, 25 bp, synthetic construct
  source 1..25: mol_type = other DNA; mol_type = other DNA
tacacagcaaggagactccatctca

SEQ ID NO: 15626 - DNA, 25 bp, synthetic construct
  source 1..25: mol_type = other DNA; mol_type = other DNA
tgcacaacaaagaggctccatctca

SEQ ID NO: 15627 - DNA, 25 bp, synthetic construct
  source 1..25: mol_type = other DNA; mol_type = other DNA
tgcacaacaagaaggctccatctca

SEQ ID NO: 15628 - DNA, 25 bp, synthetic construct
  source 1..25: mol_type = other DNA; mol_type = other DNA
tgcacaacaaggaagctccatctca

SEQ ID NO: 15629 - DNA, 25 bp, synthetic construct
  source 1..25: mol_type = other DNA; mol_type = other DNA
tgcacaacaaggagactccatctca

SEQ ID NO: 15630 - DNA, 25 bp, synthetic construct
  source 1..25: mol_type = other DNA; mol_type = other DNA
tgcacagcaaaaaggctccatctca

SEQ ID NO: 15631 - DNA, 25 bp, synthetic construct
  source 1..25: mol_type = other DNA; mol_type = other DNA
tgcacagcaaagaagctccatctca

SEQ ID NO: 15632 - DNA, 25 bp, synthetic construct
  source 1..25: mol_type = other DNA; mol_type = other DNA
tgcacagcaaagagactccatctca

SEQ ID NO: 15633 - DNA, 25 bp, synthetic construct
  source 1..25: mol_type = other DNA; mol_type = other DNA
tgcacagcaagaaagctccatctca

SEQ ID NO: 15634 - DNA, 25 bp, synthetic construct
  source 1..25: mol_type = other DNA; mol_type = other DNA
tgcacagcaagaagactccatctca

SEQ ID NO: 15635 - DNA, 25 bp, synthetic construct
  source 1..25: mol_type = other DNA; mol_type = other DNA
ctacacaacaaggaggctccatctc

SEQ ID NO: 15636 - DNA, 25 bp, synthetic construct
  source 1..25: mol_type = other DNA; mol_type = other DNA
ctacacagcaaagaggctccatctc

SEQ ID NO: 15637 - DNA, 25 bp, synthetic construct
  source 1..25: mol_type = other DNA; mol_type = other DNA
ctacacagcaagaaggctccatctc

SEQ ID NO: 15638 - DNA, 25 bp, synthetic construct
  source 1..25: mol_type = other DNA; mol_type = other DNA
ctacacagcaaggaagctccatctc

SEQ ID NO: 15639 - DNA, 25 bp, synthetic construct
  source 1..25: mol_type = other DNA; mol_type = other DNA
ctacacagcaaggagactccatctc

SEQ ID NO: 15640 - DNA, 25 bp, synthetic construct
  source 1..25: mol_type = other DNA; mol_type = other DNA
ctgcacaacaaagaggctccatctc

SEQ ID NO: 15641 - DNA, 25 bp, synthetic construct
  source 1..25: mol_type = other DNA; mol_type = other DNA
ctgcacaacaagaaggctccatctc

SEQ ID NO: 15642 - DNA, 25 bp, synthetic construct
  source 1..25: mol_type = other DNA; mol_type = other DNA
ctgcacaacaaggaagctccatctc

SEQ ID NO: 15643 - DNA, 25 bp, synthetic construct
  source 1..25: mol_type = other DNA; mol_type = other DNA
ctgcacaacaaggagactccatctc

SEQ ID NO: 15644 - DNA, 25 bp, synthetic construct
  source 1..25: mol_type = other DNA; mol_type = other DNA
ctgcacagcaaaaaggctccatctc

SEQ ID NO: 15645 - DNA, 25 bp, synthetic construct
  source 1..25: mol_type = other DNA; mol_type = other DNA
ctgcacagcaaagaagctccatctc

SEQ ID NO: 15646 - DNA, 25 bp, synthetic construct
  source 1..25: mol_type = other DNA; mol_type = other DNA
ctgcacagcaaagagactccatctc

SEQ ID NO: 15647 - DNA, 25 bp, synthetic construct
  source 1..25: mol_type = other DNA; mol_type = other DNA
ctgcacagcaagaaagctccatctc

SEQ ID NO: 15648 - DNA, 25 bp, synthetic construct
  source 1..25: mol_type = other DNA; mol_type = other DNA
ctgcacagcaagaagactccatctc

SEQ ID NO: 15649 - DNA, 25 bp, synthetic construct
  source 1..25: mol_type = other DNA; mol_type = other DNA
tctacacaacaaggaggctccatct

SEQ ID NO: 15650 - DNA, 25 bp, synthetic construct
  source 1..25: mol_type = other DNA; mol_type = other DNA
tctacacagcaaagaggctccatct

SEQ ID NO: 15651 - DNA, 25 bp, synthetic construct
  source 1..25: mol_type = other DNA; mol_type = other DNA
tctacacagcaagaaggctccatct

SEQ ID NO: 15652 - DNA, 25 bp, synthetic construct
  source 1..25: mol_type = other DNA; mol_type = other DNA
tctacacagcaaggaagctccatct

SEQ ID NO: 15653 - DNA, 25 bp, synthetic construct
  source 1..25: mol_type = other DNA; mol_type = other DNA
tctacacagcaaggagactccatct

SEQ ID NO: 15654 - DNA, 25 bp, synthetic construct
  source 1..25: mol_type = other DNA; mol_type = other DNA
tctgcacaacaaagaggctccatct

SEQ ID NO: 15655 - DNA, 25 bp, synthetic construct
  source 1..25: mol_type = other DNA; mol_type = other DNA
tctgcacaacaagaaggctccatct

SEQ ID NO: 15656 - DNA, 25 bp, synthetic construct
  source 1..25: mol_type = other DNA; mol_type = other DNA
tctgcacaacaaggaagctccatct

SEQ ID NO: 15657 - DNA, 25 bp, synthetic construct
  source 1..25: mol_type = other DNA; mol_type = other DNA
tctgcacaacaaggagactccatct

SEQ ID NO: 15658 - DNA, 25 bp, synthetic construct
  source 1..25: mol_type = other DNA; mol_type = other DNA
tctgcacagcaaaaaggctccatct

SEQ ID NO: 15659 - DNA, 25 bp, synthetic construct
  source 1..25: mol_type = other DNA; mol_type = other DNA
tctgcacagcaaagaagctccatct

SEQ ID NO: 15660 - DNA, 25 bp, synthetic construct
  source 1..25: mol_type = other DNA; mol_type = other DNA
tctgcacagcaaagagactccatct

SEQ ID NO: 15661 - DNA, 25 bp, synthetic construct
  source 1..25: mol_type = other DNA; mol_type = other DNA
tctgcacagcaagaaagctccatct

SEQ ID NO: 15662 - DNA, 25 bp, synthetic construct
  source 1..25: mol_type = other DNA; mol_type = other DNA
tctgcacagcaagaagactccatct

SEQ ID NO: 15663 - DNA, 25 bp, synthetic construct
  source 1..25: mol_type = other DNA; mol_type = other DNA
ctctacacaacaaggaggctccatc

SEQ ID NO: 15664 - DNA, 25 bp, synthetic construct
  source 1..25: mol_type = other DNA; mol_type = other DNA
ctctacacagcaaagaggctccatc

SEQ ID NO: 15665 - DNA, 25 bp, synthetic construct
  source 1..25: mol_type = other DNA; mol_type = other DNA
ctctacacagcaagaaggctccatc

SEQ ID NO: 15666 - DNA, 25 bp, synthetic construct
  source 1..25: mol_type = other DNA; mol_type = other DNA
ctctacacagcaaggaagctccatc

SEQ ID NO: 15667 - DNA, 25 bp, synthetic construct
  source 1..25: mol_type = other DNA; mol_type = other DNA
ctctacacagcaaggagactccatc

SEQ ID NO: 15668 - DNA, 25 bp, synthetic construct
  source 1..25: mol_type = other DNA; mol_type = other DNA
ctctgcacaacaaagaggctccatc

SEQ ID NO: 15669 - DNA, 25 bp, synthetic construct
  source 1..25: mol_type = other DNA; mol_type = other DNA
ctctgcacaacaagaaggctccatc

SEQ ID NO: 15670 - DNA, 25 bp, synthetic construct
  source 1..25: mol_type = other DNA; mol_type = other DNA
ctctgcacaacaaggaagctccatc

SEQ ID NO: 15671 - DNA, 25 bp, synthetic construct
  source 1..25: mol_type = other DNA; mol_type = other DNA
ctctgcacaacaaggagactccatc

SEQ ID NO: 15672 - DNA, 25 bp, synthetic construct
  source 1..25: mol_type = other DNA; mol_type = other DNA
ctctgcacagcaaaaaggctccatc

SEQ ID NO: 15673 - DNA, 25 bp, synthetic construct
  source 1..25: mol_type = other DNA; mol_type = other DNA
ctctgcacagcaaagaagctccatc

SEQ ID NO: 15674 - DNA, 25 bp, synthetic construct
  source 1..25: mol_type = other DNA; mol_type = other DNA
ctctgcacagcaaagagactccatc

SEQ ID NO: 15675 - DNA, 25 bp, synthetic construct
  source 1..25: mol_type = other DNA; mol_type = other DNA
ctctgcacagcaagaaagctccatc

SEQ ID NO: 15676 - DNA, 25 bp, synthetic construct
  source 1..25: mol_type = other DNA; mol_type = other DNA
ctctgcacagcaagaagactccatc

SEQ ID NO: 15677 - DNA, 25 bp, synthetic construct
  source 1..25: mol_type = other DNA; mol_type = other DNA
tctctacacaacaaggaggctccat

SEQ ID NO: 15678 - DNA, 25 bp, synthetic construct
  source 1..25: mol_type = other DNA; mol_type = other DNA
tctctacacagcaaagaggctccat

SEQ ID NO: 15679 - DNA, 25 bp, synthetic construct
  source 1..25: mol_type = other DNA; mol_type = other DNA
tctctacacagcaagaaggctccat

SEQ ID NO: 15680 - DNA, 25 bp, synthetic construct
  source 1..25: mol_type = other DNA; mol_type = other DNA
tctctacacagcaaggaagctccat

SEQ ID NO: 15681 - DNA, 25 bp, synthetic construct
  source 1..25: mol_type = other DNA; mol_type = other DNA
tctctacacagcaaggagactccat

SEQ ID NO: 15682 - DNA, 25 bp, synthetic construct
  source 1..25: mol_type = other DNA; mol_type = other DNA
tctctgcacaacaaagaggctccat

SEQ ID NO: 15683 - DNA, 25 bp, synthetic construct
  source 1..25: mol_type = other DNA; mol_type = other DNA
tctctgcacaacaagaaggctccat

SEQ ID NO: 15684 - DNA, 25 bp, synthetic construct
  source 1..25: mol_type = other DNA; mol_type = other DNA
tctctgcacaacaaggaagctccat

SEQ ID NO: 15685 - DNA, 25 bp, synthetic construct
  source 1..25: mol_type = other DNA; mol_type = other DNA
tctctgcacaacaaggagactccat

SEQ ID NO: 15686 - DNA, 25 bp, synthetic construct
  source 1..25: mol_type = other DNA; mol_type = other DNA
tctctgcacagcaaaaaggctccat

SEQ ID NO: 15687 - DNA, 25 bp, synthetic construct
  source 1..25: mol_type = other DNA; mol_type = other DNA
tctctgcacagcaaagaagctccat

SEQ ID NO: 15688 - DNA, 25 bp, synthetic construct
  source 1..25: mol_type = other DNA; mol_type = other DNA
tctctgcacagcaaagagactccat

SEQ ID NO: 15689 - DNA, 25 bp, synthetic construct
  source 1..25: mol_type = other DNA; mol_type = other DNA
tctctgcacagcaagaaagctccat

SEQ ID NO: 15690 - DNA, 25 bp, synthetic construct
  source 1..25: mol_type = other DNA; mol_type = other DNA
tctctgcacagcaagaagactccat

SEQ ID NO: 15691 - DNA, 25 bp, synthetic construct
  source 1..25: mol_type = other DNA; mol_type = other DNA
ttctctacacaacaaggaggctcca

SEQ ID NO: 15692 - DNA, 25 bp, synthetic construct
  source 1..25: mol_type = other DNA; mol_type = other DNA
ttctctacacagcaaagaggctcca

SEQ ID NO: 15693 - DNA, 25 bp, synthetic construct
  source 1..25: mol_type = other DNA; mol_type = other DNA
ttctctacacagcaagaaggctcca

SEQ ID NO: 15694 - DNA, 25 bp, synthetic construct
  source 1..25: mol_type = other DNA; mol_type = other DNA
ttctctacacagcaaggaagctcca

SEQ ID NO: 15695 - DNA, 25 bp, synthetic construct
  source 1..25: mol_type = other DNA; mol_type = other DNA
ttctctacacagcaaggagactcca

SEQ ID NO: 15696 - DNA, 25 bp, synthetic construct
  source 1..25: mol_type = other DNA; mol_type = other DNA
ttctctgcacaacaaagaggctcca

SEQ ID NO: 15697 - DNA, 25 bp, synthetic construct
  source 1..25: mol_type = other DNA; mol_type = other DNA
ttctctgcacaacaagaaggctcca

SEQ ID NO: 15698 - DNA, 25 bp, synthetic construct
  source 1..25: mol_type = other DNA; mol_type = other DNA
ttctctgcacaacaaggaagctcca

SEQ ID NO: 15699 - DNA, 25 bp, synthetic construct
  source 1..25: mol_type = other DNA; mol_type = other DNA
ttctctgcacaacaaggagactcca

SEQ ID NO: 15700 - DNA, 25 bp, synthetic construct
  source 1..25: mol_type = other DNA; mol_type = other DNA
ttctctgcacagcaaaaaggctcca

SEQ ID NO: 15701 - DNA, 25 bp, synthetic construct
  source 1..25: mol_type = other DNA; mol_type = other DNA
ttctctgcacagcaaagaagctcca

SEQ ID NO: 15702 - DNA, 25 bp, synthetic construct
  source 1..25: mol_type = other DNA; mol_type = other DNA
ttctctgcacagcaaagagactcca

SEQ ID NO: 15703 - DNA, 25 bp, synthetic construct
  source 1..25: mol_type = other DNA; mol_type = other DNA
ttctctgcacagcaagaaagctcca

SEQ ID NO: 15704 - DNA, 25 bp, synthetic construct
  source 1..25: mol_type = other DNA; mol_type = other DNA
ttctctgcacagcaagaagactcca

SEQ ID NO: 15705 - DNA, 25 bp, synthetic construct
  source 1..25: mol_type = other DNA; mol_type = other DNA
cttctctacacaacaaggaggctcc

SEQ ID NO: 15706 - DNA, 25 bp, synthetic construct
  source 1..25: mol_type = other DNA; mol_type = other DNA
cttctctacacagcaaagaggctcc

SEQ ID NO: 15707 - DNA, 25 bp, synthetic construct
  source 1..25: mol_type = other DNA; mol_type = other DNA
cttctctacacagcaagaaggctcc

SEQ ID NO: 15708 - DNA, 25 bp, synthetic construct
  source 1..25: mol_type = other DNA; mol_type = other DNA
cttctctacacagcaaggaagctcc

SEQ ID NO: 15709 - DNA, 25 bp, synthetic construct
  source 1..25: mol_type = other DNA; mol_type = other DNA
cttctctacacagcaaggagactcc

SEQ ID NO: 15710 - DNA, 25 bp, synthetic construct
  source 1..25: mol_type = other DNA; mol_type = other DNA
cttctctgcacaacaaagaggctcc

SEQ ID NO: 15711 - DNA, 25 bp, synthetic construct
  source 1..25: mol_type = other DNA; mol_type = other DNA
cttctctgcacaacaagaaggctcc

SEQ ID NO: 15712 - DNA, 25 bp, synthetic construct
  source 1..25: mol_type = other DNA; mol_type = other DNA
cttctctgcacaacaaggaagctcc

SEQ ID NO: 15713 - DNA, 25 bp, synthetic construct
  source 1..25: mol_type = other DNA; mol_type = other DNA
cttctctgcacaacaaggagactcc

SEQ ID NO: 15714 - DNA, 25 bp, synthetic construct
  source 1..25: mol_type = other DNA; mol_type = other DNA
cttctctgcacagcaaaaaggctcc

SEQ ID NO: 15715 - DNA, 25 bp, synthetic construct
  source 1..25: mol_type = other DNA; mol_type = other DNA
cttctctgcacagcaaagaagctcc

SEQ ID NO: 15716 - DNA, 25 bp, synthetic construct
  source 1..25: mol_type = other DNA; mol_type = other DNA
cttctctgcacagcaaagagactcc

SEQ ID NO: 15717 - DNA, 25 bp, synthetic construct
  source 1..25: mol_type = other DNA; mol_type = other DNA
cttctctgcacagcaagaaagctcc

SEQ ID NO: 15718 - DNA, 25 bp, synthetic construct
  source 1..25: mol_type = other DNA; mol_type = other DNA
cttctctgcacagcaagaagactcc

SEQ ID NO: 15719 - DNA, 25 bp, synthetic construct
  source 1..25: mol_type = other DNA; mol_type = other DNA
acttctctacacagcaaggaggctc

SEQ ID NO: 15720 - DNA, 25 bp, synthetic construct
  source 1..25: mol_type = other DNA; mol_type = other DNA
acttctctgcacaacaaggaggctc

SEQ ID NO: 15721 - DNA, 25 bp, synthetic construct
  source 1..25: mol_type = other DNA; mol_type = other DNA
acttctctgcacagcaaagaggctc

SEQ ID NO: 15722 - DNA, 25 bp, synthetic construct
  source 1..25: mol_type = other DNA; mol_type = other DNA
acttctctgcacagcaagaaggctc

SEQ ID NO: 15723 - DNA, 25 bp, synthetic construct
  source 1..25: mol_type = other DNA; mol_type = other DNA
acttctctgcacagcaaggaagctc

SEQ ID NO: 15724 - DNA, 25 bp, synthetic construct
  source 1..25: mol_type = other DNA; mol_type = other DNA
acttctctgcacagcaaggagactc

SEQ ID NO: 15725 - DNA, 25 bp, synthetic construct
  source 1..25: mol_type = other DNA; mol_type = other DNA
gcttctctacacaacaaggaggctc

SEQ ID NO: 15726 - DNA, 25 bp, synthetic construct
  source 1..25: mol_type = other DNA; mol_type = other DNA
gcttctctacacagcaaagaggctc

SEQ ID NO: 15727 - DNA, 25 bp, synthetic construct
  source 1..25: mol_type = other DNA; mol_type = other DNA
gcttctctacacagcaagaaggctc

SEQ ID NO: 15728 - DNA, 25 bp, synthetic construct
  source 1..25: mol_type = other DNA; mol_type = other DNA
gcttctctacacagcaaggaagctc

SEQ ID NO: 15729 - DNA, 25 bp, synthetic construct
  source 1..25: mol_type = other DNA; mol_type = other DNA
gcttctctacacagcaaggagactc

SEQ ID NO: 15730 - DNA, 25 bp, synthetic construct
  source 1..25: mol_type = other DNA; mol_type = other DNA
gcttctctgcacaacaaagaggctc

SEQ ID NO: 15731 - DNA, 25 bp, synthetic construct
  source 1..25: mol_type = other DNA; mol_type = other DNA
gcttctctgcacaacaagaaggctc

SEQ ID NO: 15732 - DNA, 25 bp, synthetic construct
  source 1..25: mol_type = other DNA; mol_type = other DNA
gcttctctgcacaacaaggaagctc

SEQ ID NO: 15733 - DNA, 25 bp, synthetic construct
  source 1..25: mol_type = other DNA; mol_type = other DNA
gcttctctgcacaacaaggagactc

SEQ ID NO: 15734 - DNA, 25 bp, synthetic construct
  source 1..25: mol_type = other DNA; mol_type = other DNA
gcttctctgcacagcaaaaaggctc

SEQ ID NO: 15735 - DNA, 25 bp, synthetic construct
  source 1..25: mol_type = other DNA; mol_type = other DNA
gcttctctgcacagcaaagaagctc

SEQ ID NO: 15736 - DNA, 25 bp, synthetic construct
  source 1..25: mol_type = other DNA; mol_type = other DNA
gcttctctgcacagcaaagagactc

SEQ ID NO: 15737 - DNA, 25 bp, synthetic construct
  source 1..25: mol_type = other DNA; mol_type = other DNA
gcttctctgcacagcaagaaagctc

SEQ ID NO: 15738 - DNA, 25 bp, synthetic construct
  source 1..25: mol_type = other DNA; mol_type = other DNA
gcttctctgcacagcaagaagactc

SEQ ID NO: 15739 - DNA, 25 bp, synthetic construct
  source 1..25: mol_type = other DNA; mol_type = other DNA
aacttctctacacagcaaggaggct

SEQ ID NO: 15740 - DNA, 25 bp, synthetic construct
  source 1..25: mol_type = other DNA; mol_type = other DNA
aacttctctgcacaacaaggaggct

SEQ ID NO: 15741 - DNA, 25 bp, synthetic construct
  source 1..25: mol_type = other DNA; mol_type = other DNA
aacttctctgcacagcaaagaggct

SEQ ID NO: 15742 - DNA, 25 bp, synthetic construct
  source 1..25: mol_type = other DNA; mol_type = other DNA
aacttctctgcacagcaagaaggct

SEQ ID NO: 15743 - DNA, 25 bp, synthetic construct
  source 1..25: mol_type = other DNA; mol_type = other DNA
aacttctctgcacagcaaggaagct

SEQ ID NO: 15744 - DNA, 25 bp, synthetic construct
  source 1..25: mol_type = other DNA; mol_type = other DNA
aacttctctgcacagcaaggagact

SEQ ID NO: 15745 - DNA, 25 bp, synthetic construct
  source 1..25: mol_type = other DNA; mol_type = other DNA
agcttctctacacaacaaggaggct

SEQ ID NO: 15746 - DNA, 25 bp, synthetic construct
  source 1..25: mol_type = other DNA; mol_type = other DNA
agcttctctacacagcaaagaggct

SEQ ID NO: 15747 - DNA, 25 bp, synthetic construct
  source 1..25: mol_type = other DNA; mol_type = other DNA
agcttctctacacagcaagaaggct

SEQ ID NO: 15748 - DNA, 25 bp, synthetic construct
  source 1..25: mol_type = other DNA; mol_type = other DNA
agcttctctacacagcaaggaagct

SEQ ID NO: 15749 - DNA, 25 bp, synthetic construct
  source 1..25: mol_type = other DNA; mol_type = other DNA
agcttctctacacagcaaggagact

SEQ ID NO: 15750 - DNA, 25 bp, synthetic construct
  source 1..25: mol_type = other DNA; mol_type = other DNA
agcttctctgcacaacaaagaggct

SEQ ID NO: 15751 - DNA, 25 bp, synthetic construct
  source 1..25: mol_type = other DNA; mol_type = other DNA
agcttctctgcacaacaagaaggct

SEQ ID NO: 15752 - DNA, 25 bp, synthetic construct
  source 1..25: mol_type = other DNA; mol_type = other DNA
agcttctctgcacaacaaggaagct

SEQ ID NO: 15753 - DNA, 25 bp, synthetic construct
  source 1..25: mol_type = other DNA; mol_type = other DNA
agcttctctgcacaacaaggagact

SEQ ID NO: 15754 - DNA, 25 bp, synthetic construct
  source 1..25: mol_type = other DNA; mol_type = other DNA
agcttctctgcacagcaaaaaggct

SEQ ID NO: 15755 - DNA, 25 bp, synthetic construct
  source 1..25: mol_type = other DNA; mol_type = other DNA
agcttctctgcacagcaaagaagct

SEQ ID NO: 15756 - DNA, 25 bp, synthetic construct
  source 1..25: mol_type = other DNA; mol_type = other DNA
agcttctctgcacagcaaagagact

SEQ ID NO: 15757 - DNA, 25 bp, synthetic construct
  source 1..25: mol_type = other DNA; mol_type = other DNA
agcttctctgcacagcaagaaagct

SEQ ID NO: 15758 - DNA, 25 bp, synthetic construct
  source 1..25: mol_type = other DNA; mol_type = other DNA
agcttctctgcacagcaagaagact

SEQ ID NO: 15759 - DNA, 25 bp, synthetic construct
  source 1..25: mol_type = other DNA; mol_type = other DNA
caacttctctacacagcaaggaggc

SEQ ID NO: 15760 - DNA, 25 bp, synthetic construct
  source 1..25: mol_type = other DNA; mol_type = other DNA
caacttctctgcacaacaaggaggc

SEQ ID NO: 15761 - DNA, 25 bp, synthetic construct
  source 1..25: mol_type = other DNA; mol_type = other DNA
caacttctctgcacagcaaagaggc

SEQ ID NO: 15762 - DNA, 25 bp, synthetic construct
  source 1..25: mol_type = other DNA; mol_type = other DNA
caacttctctgcacagcaagaaggc

SEQ ID NO: 15763 - DNA, 25 bp, synthetic construct
  source 1..25: mol_type = other DNA; mol_type = other DNA
caacttctctgcacagcaaggaagc

SEQ ID NO: 15764 - DNA, 25 bp, synthetic construct
  source 1..25: mol_type = other DNA; mol_type = other DNA
caacttctctgcacagcaaggagac

SEQ ID NO: 15765 - DNA, 25 bp, synthetic construct
  source 1..25: mol_type = other DNA; mol_type = other DNA
cagcttctctacacaacaaggaggc

SEQ ID NO: 15766 - DNA, 25 bp, synthetic construct
  source 1..25: mol_type = other DNA; mol_type = other DNA
cagcttctctacacagcaaagaggc

SEQ ID NO: 15767 - DNA, 25 bp, synthetic construct
  source 1..25: mol_type = other DNA; mol_type = other DNA
cagcttctctacacagcaagaaggc

SEQ ID NO: 15768 - DNA, 25 bp, synthetic construct
  source 1..25: mol_type = other DNA; mol_type = other DNA
cagcttctctacacagcaaggaagc

SEQ ID NO: 15769 - DNA, 25 bp, synthetic construct
  source 1..25: mol_type = other DNA; mol_type = other DNA
cagcttctctacacagcaaggagac

SEQ ID NO: 15770 - DNA, 25 bp, synthetic construct
  source 1..25: mol_type = other DNA; mol_type = other DNA
cagcttctctgcacaacaaagaggc

SEQ ID NO: 15771 - DNA, 25 bp, synthetic construct
  source 1..25: mol_type = other DNA; mol_type = other DNA
cagcttctctgcacaacaagaaggc

SEQ ID NO: 15772 - DNA, 25 bp, synthetic construct
  source 1..25: mol_type = other DNA; mol_type = other DNA
cagcttctctgcacaacaaggaagc

SEQ ID NO: 15773 - DNA, 25 bp, synthetic construct
  source 1..25: mol_type = other DNA; mol_type = other DNA
cagcttctctgcacaacaaggagac

SEQ ID NO: 15774 - DNA, 25 bp, synthetic construct
  source 1..25: mol_type = other DNA; mol_type = other DNA
cagcttctctgcacagcaaaaaggc

SEQ ID NO: 15775 - DNA, 25 bp, synthetic construct
  source 1..25: mol_type = other DNA; mol_type = other DNA
cagcttctctgcacagcaaagaagc

SEQ ID NO: 15776 - DNA, 25 bp, synthetic construct
  source 1..25: mol_type = other DNA; mol_type = other DNA
cagcttctctgcacagcaaagagac

SEQ ID NO: 15777 - DNA, 25 bp, synthetic construct
  source 1..25: mol_type = other DNA; mol_type = other DNA
cagcttctctgcacagcaagaaagc

SEQ ID NO: 15778 - DNA, 25 bp, synthetic construct
  source 1..25: mol_type = other DNA; mol_type = other DNA
cagcttctctgcacagcaagaagac

SEQ ID NO: 15779 - DNA, 25 bp, synthetic construct
  source 1..25: mol_type = other DNA; mol_type = other DNA
ccaacttctctacacagcaaggagg

SEQ ID NO: 15780 - DNA, 25 bp, synthetic construct
  source 1..25: mol_type = other DNA; mol_type = other DNA
ccaacttctctgcacaacaaggagg

SEQ ID NO: 15781 - DNA, 25 bp, synthetic construct
  source 1..25: mol_type = other DNA; mol_type = other DNA
ccaacttctctgcacagcaaagagg

SEQ ID NO: 15782 - DNA, 25 bp, synthetic construct
  source 1..25: mol_type = other DNA; mol_type = other DNA
ccaacttctctgcacagcaagaagg

SEQ ID NO: 15783 - DNA, 25 bp, synthetic construct
  source 1..25: mol_type = other DNA; mol_type = other DNA
ccaacttctctgcacagcaaggaag

SEQ ID NO: 15784 - DNA, 25 bp, synthetic construct
  source 1..25: mol_type = other DNA; mol_type = other DNA
ccaacttctctgcacagcaaggaga

SEQ ID NO: 15785 - DNA, 25 bp, synthetic construct
  source 1..25: mol_type = other DNA; mol_type = other DNA
ccagcttctctacacaacaaggagg

SEQ ID NO: 15786 - DNA, 25 bp, synthetic construct
  source 1..25: mol_type = other DNA; mol_type = other DNA
ccagcttctctacacagcaaagagg

SEQ ID NO: 15787 - DNA, 25 bp, synthetic construct
  source 1..25: mol_type = other DNA; mol_type = other DNA
ccagcttctctacacagcaagaagg

SEQ ID NO: 15788 - DNA, 25 bp, synthetic construct
  source 1..25: mol_type = other DNA; mol_type = other DNA
ccagcttctctacacagcaaggaag

SEQ ID NO: 15789 - DNA, 25 bp, synthetic construct
  source 1..25: mol_type = other DNA; mol_type = other DNA
ccagcttctctacacagcaaggaga

SEQ ID NO: 15790 - DNA, 25 bp, synthetic construct
  source 1..25: mol_type = other DNA; mol_type = other DNA
ccagcttctctgcacaacaaagagg

SEQ ID NO: 15791 - DNA, 25 bp, synthetic construct
  source 1..25: mol_type = other DNA; mol_type = other DNA
ccagcttctctgcacaacaagaagg

SEQ ID NO: 15792 - DNA, 25 bp, synthetic construct
  source 1..25: mol_type = other DNA; mol_type = other DNA
ccagcttctctgcacaacaaggaag

SEQ ID NO: 15793 - DNA, 25 bp, synthetic construct
  source 1..25: mol_type = other DNA; mol_type = other DNA
ccagcttctctgcacaacaaggaga

SEQ ID NO: 15794 - DNA, 25 bp, synthetic construct
  source 1..25: mol_type = other DNA; mol_type = other DNA
ccagcttctctgcacagcaaaaagg

SEQ ID NO: 15795 - DNA, 25 bp, synthetic construct
  source 1..25: mol_type = other DNA; mol_type = other DNA
ccagcttctctgcacagcaaagaag

SEQ ID NO: 15796 - DNA, 25 bp, synthetic construct
  source 1..25: mol_type = other DNA; mol_type = other DNA
ccagcttctctgcacagcaaagaga

SEQ ID NO: 15797 - DNA, 25 bp, synthetic construct
  source 1..25: mol_type = other DNA; mol_type = other DNA
ccagcttctctgcacagcaagaaag

SEQ ID NO: 15798 - DNA, 25 bp, synthetic construct
  source 1..25: mol_type = other DNA; mol_type = other DNA
ccagcttctctgcacagcaagaaga

SEQ ID NO: 15799 - DNA, 25 bp, synthetic construct
  source 1..25: mol_type = other DNA; mol_type = other DNA
tccaacttctctacacagcaaggag

SEQ ID NO: 15800 - DNA, 25 bp, synthetic construct
  source 1..25: mol_type = other DNA; mol_type = other DNA
tccaacttctctgcacaacaaggag

SEQ ID NO: 15801 - DNA, 25 bp, synthetic construct
  source 1..25: mol_type = other DNA; mol_type = other DNA
tccaacttctctgcacagcaaagag

SEQ ID NO: 15802 - DNA, 25 bp, synthetic construct
  source 1..25: mol_type = other DNA; mol_type = other DNA
tccaacttctctgcacagcaagaag

SEQ ID NO: 15803 - DNA, 25 bp, synthetic construct
  source 1..25: mol_type = other DNA; mol_type = other DNA
tccaacttctctgcacagcaaggaa

SEQ ID NO: 15804 - DNA, 25 bp, synthetic construct
  source 1..25: mol_type = other DNA; mol_type = other DNA
tccagcttctctacacaacaaggag

SEQ ID NO: 15805 - DNA, 25 bp, synthetic construct
  source 1..25: mol_type = other DNA; mol_type = other DNA
tccagcttctctacacagcaaagag

SEQ ID NO: 15806 - DNA, 25 bp, synthetic construct
  source 1..25: mol_type = other DNA; mol_type = other DNA
tccagcttctctacacagcaagaag

SEQ ID NO: 15807 - DNA, 25 bp, synthetic construct
  source 1..25: mol_type = other DNA; mol_type = other DNA
tccagcttctctacacagcaaggaa

SEQ ID NO: 15808 - DNA, 25 bp, synthetic construct
  source 1..25: mol_type = other DNA; mol_type = other DNA
tccagcttctctgcacaacaaagag

SEQ ID NO: 15809 - DNA, 25 bp, synthetic construct
  source 1..25: mol_type = other DNA; mol_type = other DNA
tccagcttctctgcacaacaagaag

SEQ ID NO: 15810 - DNA, 25 bp, synthetic construct
  source 1..25: mol_type = other DNA; mol_type = other DNA
tccagcttctctgcacaacaaggaa

SEQ ID NO: 15811 - DNA, 25 bp, synthetic construct
  source 1..25: mol_type = other DNA; mol_type = other DNA
tccagcttctctgcacagcaaaaag

SEQ ID NO: 15812 - DNA, 25 bp, synthetic construct
  source 1..25: mol_type = other DNA; mol_type = other DNA
tccagcttctctgcacagcaaagaa

SEQ ID NO: 15813 - DNA, 25 bp, synthetic construct
  source 1..25: mol_type = other DNA; mol_type = other DNA
atccaacttctctgcacagcaagga

SEQ ID NO: 15814 - DNA, 25 bp, synthetic construct
  source 1..25: mol_type = other DNA; mol_type = other DNA
atccagcttctctacacagcaagga

SEQ ID NO: 15815 - DNA, 25 bp, synthetic construct
  source 1..25: mol_type = other DNA; mol_type = other DNA
atccagcttctctgcacaacaagga

SEQ ID NO: 15816 - DNA, 25 bp, synthetic construct
  source 1..25: mol_type = other DNA; mol_type = other DNA
atccagcttctctgcacagcaaaga

SEQ ID NO: 15817 - DNA, 25 bp, synthetic construct
  source 1..25: mol_type = other DNA; mol_type = other DNA
atccagcttctctgcacagcaagaa

SEQ ID NO: 15818 - DNA, 25 bp, synthetic construct
  source 1..25: mol_type = other DNA; mol_type = other DNA
gtccaacttctctacacagcaagga

SEQ ID NO: 15819 - DNA, 25 bp, synthetic construct
  source 1..25: mol_type = other DNA; mol_type = other DNA
gtccaacttctctgcacaacaagga

SEQ ID NO: 15820 - DNA, 25 bp, synthetic construct
  source 1..25: mol_type = other DNA; mol_type = other DNA
gtccaacttctctgcacagcaaaga

SEQ ID NO: 15821 - DNA, 25 bp, synthetic construct
  source 1..25: mol_type = other DNA; mol_type = other DNA
gtccaacttctctgcacagcaagaa

SEQ ID NO: 15822 - DNA, 25 bp, synthetic construct
  source 1..25: mol_type = other DNA; mol_type = other DNA
gtccagcttctctacacaacaagga

SEQ ID NO: 15823 - DNA, 25 bp, synthetic construct
  source 1..25: mol_type = other DNA; mol_type = other DNA
gtccagcttctctacacagcaaaga

SEQ ID NO: 15824 - DNA, 25 bp, synthetic construct
  source 1..25: mol_type = other DNA; mol_type = other DNA
gtccagcttctctacacagcaagaa

SEQ ID NO: 15825 - DNA, 25 bp, synthetic construct
  source 1..25: mol_type = other DNA; mol_type = other DNA
gtccagcttctctgcacaacaaaga

SEQ ID NO: 15826 - DNA, 25 bp, synthetic construct
  source 1..25: mol_type = other DNA; mol_type = other DNA
gtccagcttctctgcacaacaagaa

SEQ ID NO: 15827 - DNA, 25 bp, synthetic construct
  source 1..25: mol_type = other DNA; mol_type = other DNA
catccaacttctctgcacagcaagg

SEQ ID NO: 15828 - DNA, 25 bp, synthetic construct
  source 1..25: mol_type = other DNA; mol_type = other DNA
catccagcttctctacacagcaagg

SEQ ID NO: 15829 - DNA, 25 bp, synthetic construct
  source 1..25: mol_type = other DNA; mol_type = other DNA
catccagcttctctgcacaacaagg

SEQ ID NO: 15830 - DNA, 25 bp, synthetic construct
  source 1..25: mol_type = other DNA; mol_type = other DNA
catccagcttctctgcacagcaaag

SEQ ID NO: 15831 - DNA, 25 bp, synthetic construct
  source 1..25: mol_type = other DNA; mol_type = other DNA
catccagcttctctgcacagcaaga

SEQ ID NO: 15832 - DNA, 25 bp, synthetic construct
  source 1..25: mol_type = other DNA; mol_type = other DNA
cgtccaacttctctacacagcaagg

SEQ ID NO: 15833 - DNA, 25 bp, synthetic construct
  source 1..25: mol_type = other DNA; mol_type = other DNA
cgtccaacttctctgcacaacaagg

SEQ ID NO: 15834 - DNA, 25 bp, synthetic construct
  source 1..25: mol_type = other DNA; mol_type = other DNA
cgtccaacttctctgcacagcaaag

SEQ ID NO: 15835 - DNA, 25 bp, synthetic construct
  source 1..25: mol_type = other DNA; mol_type = other DNA
cgtccaacttctctgcacagcaaga

SEQ ID NO: 15836 - DNA, 25 bp, synthetic construct
  source 1..25: mol_type = other DNA; mol_type = other DNA
cgtccagcttctctacacaacaagg

SEQ ID NO: 15837 - DNA, 25 bp, synthetic construct
  source 1..25: mol_type = other DNA; mol_type = other DNA
cgtccagcttctctacacagcaaag

SEQ ID NO: 15838 - DNA, 25 bp, synthetic construct
  source 1..25: mol_type = other DNA; mol_type = other DNA
cgtccagcttctctacacagcaaga

SEQ ID NO: 15839 - DNA, 25 bp, synthetic construct
  source 1..25: mol_type = other DNA; mol_type = other DNA
cgtccagcttctctgcacaacaaag

SEQ ID NO: 15840 - DNA, 25 bp, synthetic construct
  source 1..25: mol_type = other DNA; mol_type = other DNA
cgtccagcttctctgcacaacaaga

SEQ ID NO: 15841 - DNA, 25 bp, synthetic construct
  source 1..25: mol_type = other DNA; mol_type = other DNA
tcatccaacttctctgcacagcaag

SEQ ID NO: 15842 - DNA, 25 bp, synthetic construct
  source 1..25: mol_type = other DNA; mol_type = other DNA
tcatccagcttctctacacagcaag

SEQ ID NO: 15843 - DNA, 25 bp, synthetic construct
  source 1..25: mol_type = other DNA; mol_type = other DNA
tcatccagcttctctgcacaacaag

SEQ ID NO: 15844 - DNA, 25 bp, synthetic construct
  source 1..25: mol_type = other DNA; mol_type = other DNA
tcatccagcttctctgcacagcaaa

SEQ ID NO: 15845 - DNA, 25 bp, synthetic construct
  source 1..25: mol_type = other DNA; mol_type = other DNA
tcgtccaacttctctacacagcaag

SEQ ID NO: 15846 - DNA, 25 bp, synthetic construct
  source 1..25: mol_type = other DNA; mol_type = other DNA
tcgtccaacttctctgcacaacaag

SEQ ID NO: 15847 - DNA, 25 bp, synthetic construct
  source 1..25: mol_type = other DNA; mol_type = other DNA
tcgtccaacttctctgcacagcaaa

SEQ ID NO: 15848 - DNA, 25 bp, synthetic construct
  source 1..25: mol_type = other DNA; mol_type = other DNA
tcgtccagcttctctacacaacaag

SEQ ID NO: 15849 - DNA, 25 bp, synthetic construct
  source 1..25: mol_type = other DNA; mol_type = other DNA
tcgtccagcttctctacacagcaaa

SEQ ID NO: 15850 - DNA, 25 bp, synthetic construct
  source 1..25: mol_type = other DNA; mol_type = other DNA
ctcatccaacttctctgcacagcaa

SEQ ID NO: 15851 - DNA, 25 bp, synthetic construct
  source 1..25: mol_type = other DNA; mol_type = other DNA
ctcatccagcttctctacacagcaa

SEQ ID NO: 15852 - DNA, 25 bp, synthetic construct
  source 1..25: mol_type = other DNA; mol_type = other DNA
ctcatccagcttctctgcacaacaa

SEQ ID NO: 15853 - DNA, 25 bp, synthetic construct
  source 1..25: mol_type = other DNA; mol_type = other DNA
ctcgtccaacttctctacacagcaa

SEQ ID NO: 15854 - DNA, 25 bp, synthetic construct
  source 1..25: mol_type = other DNA; mol_type = other DNA
ctcgtccaacttctctgcacaacaa

SEQ ID NO: 15855 - DNA, 25 bp, synthetic construct
  source 1..25: mol_type = other DNA; mol_type = other DNA
tctcatccaacttctctgcacagca

SEQ ID NO: 15856 - DNA, 25 bp, synthetic construct
  source 1..25: mol_type = other DNA; mol_type = other DNA
tctcatccagcttctctacacagca

SEQ ID NO: 15857 - DNA, 25 bp, synthetic construct
  source 1..25: mol_type = other DNA; mol_type = other DNA
tctcatccagcttctctgcacaaca

SEQ ID NO: 15858 - DNA, 25 bp, synthetic construct
  source 1..25: mol_type = other DNA; mol_type = other DNA
tctcgtccaacttctctacacagca

SEQ ID NO: 15859 - DNA, 25 bp, synthetic construct
  source 1..25: mol_type = other DNA; mol_type = other DNA
tctcgtccaacttctctgcacaaca

SEQ ID NO: 15860 - DNA, 25 bp, synthetic construct
  source 1..25: mol_type = other DNA; mol_type = other DNA
atctcatccaacttctctgcacagc

SEQ ID NO: 15861 - DNA, 25 bp, synthetic construct
  source 1..25: mol_type = other DNA; mol_type = other DNA
atctcatccagcttctctacacagc

SEQ ID NO: 15862 - DNA, 25 bp, synthetic construct
  source 1..25: mol_type = other DNA; mol_type = other DNA
atctcatccagcttctctgcacaac

SEQ ID NO: 15863 - DNA, 25 bp, synthetic construct
  source 1..25: mol_type = other DNA; mol_type = other DNA
atctcgtccaacttctctacacagc

SEQ ID NO: 15864 - DNA, 25 bp, synthetic construct
  source 1..25: mol_type = other DNA; mol_type = other DNA
atctcgtccaacttctctgcacaac

SEQ ID NO: 15865 - DNA, 25 bp, synthetic construct
  source 1..25: mol_type = other DNA; mol_type = other DNA
catctcatccaacttctctgcacag

SEQ ID NO: 15866 - DNA, 25 bp, synthetic construct
  source 1..25: mol_type = other DNA; mol_type = other DNA
catctcatccagcttctctacacag

SEQ ID NO: 15867 - DNA, 25 bp, synthetic construct
  source 1..25: mol_type = other DNA; mol_type = other DNA
catctcatccagcttctctgcacaa

SEQ ID NO: 15868 - DNA, 25 bp, synthetic construct
  source 1..25: mol_type = other DNA; mol_type = other DNA
catctcgtccaacttctctacacag

SEQ ID NO: 15869 - DNA, 25 bp, synthetic construct
  source 1..25: mol_type = other DNA; mol_type = other DNA
catctcgtccaacttctctgcacaa

SEQ ID NO: 15870 - DNA, 25 bp, synthetic construct
  source 1..25: mol_type = other DNA; mol_type = other DNA
acatctcatccagcttctctgcaca

SEQ ID NO: 15871 - DNA, 25 bp, synthetic construct
  source 1..25: mol_type = other DNA; mol_type = other DNA
acatctcgtccaacttctctgcaca

SEQ ID NO: 15872 - DNA, 25 bp, synthetic construct
  source 1..25: mol_type = other DNA; mol_type = other DNA
acatctcgtccagcttctctacaca

SEQ ID NO: 15873 - DNA, 25 bp, synthetic construct
  source 1..25: mol_type = other DNA; mol_type = other DNA
gcatctcatccaacttctctgcaca

SEQ ID NO: 15874 - DNA, 25 bp, synthetic construct
  source 1..25: mol_type = other DNA; mol_type = other DNA
gcatctcatccagcttctctacaca

SEQ ID NO: 15875 - DNA, 25 bp, synthetic construct
  source 1..25: mol_type = other DNA; mol_type = other DNA
aacatctcatccagcttctctgcac

SEQ ID NO: 15876 - DNA, 25 bp, synthetic construct
  source 1..25: mol_type = other DNA; mol_type = other DNA
aacatctcgtccaacttctctgcac

SEQ ID NO: 15877 - DNA, 25 bp, synthetic construct
  source 1..25: mol_type = other DNA; mol_type = other DNA
aacatctcgtccagcttctctacac

SEQ ID NO: 15878 - DNA, 25 bp, synthetic construct
  source 1..25: mol_type = other DNA; mol_type = other DNA
agcatctcatccaacttctctgcac

SEQ ID NO: 15879 - DNA, 25 bp, synthetic construct
  source 1..25: mol_type = other DNA; mol_type = other DNA
agcatctcatccagcttctctacac

SEQ ID NO: 15880 - DNA, 25 bp, synthetic construct
  source 1..25: mol_type = other DNA; mol_type = other DNA
caacatctcatccagcttctctgca

SEQ ID NO: 15881 - DNA, 25 bp, synthetic construct
  source 1..25: mol_type = other DNA; mol_type = other DNA
caacatctcgtccaacttctctgca

SEQ ID NO: 15882 - DNA, 25 bp, synthetic construct
  source 1..25: mol_type = other DNA; mol_type = other DNA
caacatctcgtccagcttctctaca

SEQ ID NO: 15883 - DNA, 25 bp, synthetic construct
  source 1..25: mol_type = other DNA; mol_type = other DNA
cagcatctcatccaacttctctgca

SEQ ID NO: 15884 - DNA, 25 bp, synthetic construct
  source 1..25: mol_type = other DNA; mol_type = other DNA
cagcatctcatccagcttctctaca

SEQ ID NO: 15885 - DNA, 25 bp, synthetic construct
  source 1..25: mol_type = other DNA; mol_type = other DNA
ccaacatctcatccagcttctctgc

SEQ ID NO: 15886 - DNA, 25 bp, synthetic construct
  source 1..25: mol_type = other DNA; mol_type = other DNA
ccaacatctcgtccaacttctctgc

SEQ ID NO: 15887 - DNA, 25 bp, synthetic construct
  source 1..25: mol_type = other DNA; mol_type = other DNA
ccaacatctcgtccagcttctctac

SEQ ID NO: 15888 - DNA, 25 bp, synthetic construct
  source 1..25: mol_type = other DNA; mol_type = other DNA
ccagcatctcatccaacttctctgc

SEQ ID NO: 15889 - DNA, 25 bp, synthetic construct
  source 1..25: mol_type = other DNA; mol_type = other DNA
ccagcatctcatccagcttctctac

SEQ ID NO: 15890 - DNA, 25 bp, synthetic construct
  source 1..25: mol_type = other DNA; mol_type = other DNA
accaacatctcgtccagcttctctg

SEQ ID NO: 15891 - DNA, 25 bp, synthetic construct
  source 1..25: mol_type = other DNA; mol_type = other DNA
accagcatctcatccagcttctctg

SEQ ID NO: 15892 - DNA, 25 bp, synthetic construct
  source 1..25: mol_type = other DNA; mol_type = other DNA
accagcatctcgtccaacttctctg

SEQ ID NO: 15893 - DNA, 25 bp, synthetic construct
  source 1..25: mol_type = other DNA; mol_type = other DNA
accagcatctcgtccagcttctcta

SEQ ID NO: 15894 - DNA, 25 bp, synthetic construct
  source 1..25: mol_type = other DNA; mol_type = other DNA
gccaacatctcatccagcttctctg

SEQ ID NO: 15895 - DNA, 25 bp, synthetic construct
  source 1..25: mol_type = other DNA; mol_type = other DNA
gccaacatctcgtccaacttctctg

SEQ ID NO: 15896 - DNA, 25 bp, synthetic construct
  source 1..25: mol_type = other DNA; mol_type = other DNA
gccaacatctcgtccagcttctcta

SEQ ID NO: 15897 - DNA, 25 bp, synthetic construct
  source 1..25: mol_type = other DNA; mol_type = other DNA
gccagcatctcatccaacttctctg

SEQ ID NO: 15898 - DNA, 25 bp, synthetic construct
  source 1..25: mol_type = other DNA; mol_type = other DNA
gccagcatctcatccagcttctcta

SEQ ID NO: 15899 - DNA, 25 bp, synthetic construct
  source 1..25: mol_type = other DNA; mol_type = other DNA
taccaacatctcgtccagcttctct

SEQ ID NO: 15900 - DNA, 25 bp, synthetic construct
  source 1..25: mol_type = other DNA; mol_type = other DNA
taccagcatctcatccagcttctct

SEQ ID NO: 15901 - DNA, 25 bp, synthetic construct
  source 1..25: mol_type = other DNA; mol_type = other DNA
taccagcatctcgtccaacttctct

SEQ ID NO: 15902 - DNA, 25 bp, synthetic construct
  source 1..25: mol_type = other DNA; mol_type = other DNA
tgccaacatctcatccagcttctct

SEQ ID NO: 15903 - DNA, 25 bp, synthetic construct
  source 1..25: mol_type = other DNA; mol_type = other DNA
tgccaacatctcgtccaacttctct

SEQ ID NO: 15904 - DNA, 25 bp, synthetic construct
  source 1..25: mol_type = other DNA; mol_type = other DNA
ctaccaacatctcgtccagcttctc

SEQ ID NO: 15905 - DNA, 25 bp, synthetic construct
  source 1..25: mol_type = other DNA; mol_type = other DNA
ctaccagcatctcatccagcttctc

SEQ ID NO: 15906 - DNA, 25 bp, synthetic construct
  source 1..25: mol_type = other DNA; mol_type = other DNA
ctaccagcatctcgtccaacttctc

SEQ ID NO: 15907 - DNA, 25 bp, synthetic construct
  source 1..25: mol_type = other DNA; mol_type = other DNA
ctgccaacatctcatccagcttctc

SEQ ID NO: 15908 - DNA, 25 bp, synthetic construct
  source 1..25: mol_type = other DNA; mol_type = other DNA
ctgccaacatctcgtccaacttctc

SEQ ID NO: 15909 - DNA, 25 bp, synthetic construct
  source 1..25: mol_type = other DNA; mol_type = other DNA
actaccagcatctcgtccagcttct

SEQ ID NO: 15910 - DNA, 25 bp, synthetic construct
  source 1..25: mol_type = other DNA; mol_type = other DNA
actgccaacatctcgtccagcttct

SEQ ID NO: 15911 - DNA, 25 bp, synthetic construct
  source 1..25: mol_type = other DNA; mol_type = other DNA
actgccagcatctcatccagcttct

SEQ ID NO: 15912 - DNA, 25 bp, synthetic construct
  source 1..25: mol_type = other DNA; mol_type = other DNA
actgccagcatctcgtccaacttct

SEQ ID NO: 15913 - DNA, 25 bp, synthetic construct
  source 1..25: mol_type = other DNA; mol_type = other DNA
gctaccaacatctcgtccagcttct

SEQ ID NO: 15914 - DNA, 25 bp, synthetic construct
  source 1..25: mol_type = other DNA; mol_type = other DNA
gctaccagcatctcatccagcttct

SEQ ID NO: 15915 - DNA, 25 bp, synthetic construct
  source 1..25: mol_type = other DNA; mol_type = other DNA
gctaccagcatctcgtccaacttct

SEQ ID NO: 15916 - DNA, 25 bp, synthetic construct
  source 1..25: mol_type = other DNA; mol_type = other DNA
gctgccaacatctcatccagcttct

SEQ ID NO: 15917 - DNA, 25 bp, synthetic construct
  source 1..25: mol_type = other DNA; mol_type = other DNA
gctgccaacatctcgtccaacttct

SEQ ID NO: 15918 - DNA, 25 bp, synthetic construct
  source 1..25: mol_type = other DNA; mol_type = other DNA
aactgccagcatctcgtccagcttc

SEQ ID NO: 15919 - DNA, 25 bp, synthetic construct
  source 1..25: mol_type = other DNA; mol_type = other DNA
agctaccagcatctcgtccagcttc

SEQ ID NO: 15920 - DNA, 25 bp, synthetic construct
  source 1..25: mol_type = other DNA; mol_type = other DNA
agctgccaacatctcgtccagcttc

SEQ ID NO: 15921 - DNA, 25 bp, synthetic construct
  source 1..25: mol_type = other DNA; mol_type = other DNA
agctgccagcatctcatccagcttc

SEQ ID NO: 15922 - DNA, 25 bp, synthetic construct
  source 1..25: mol_type = other DNA; mol_type = other DNA
agctgccagcatctcgtccaacttc

SEQ ID NO: 15923 - DNA, 25 bp, synthetic construct
  source 1..25: mol_type = other DNA; mol_type = other DNA
gactaccagcatctcgtccagcttc

SEQ ID NO: 15924 - DNA, 25 bp, synthetic construct
  source 1..25: mol_type = other DNA; mol_type = other DNA
gactgccaacatctcgtccagcttc

SEQ ID NO: 15925 - DNA, 25 bp, synthetic construct
  source 1..25: mol_type = other DNA; mol_type = other DNA
gactgccagcatctcatccagcttc

SEQ ID NO: 15926 - DNA, 25 bp, synthetic construct
  source 1..25: mol_type = other DNA; mol_type = other DNA
gactgccagcatctcgtccaacttc

SEQ ID NO: 15927 - DNA, 25 bp, synthetic construct
  source 1..25: mol_type = other DNA; mol_type = other DNA
ggctaccaacatctcgtccagcttc

SEQ ID NO: 15928 - DNA, 25 bp, synthetic construct
  source 1..25: mol_type = other DNA; mol_type = other DNA
ggctaccagcatctcatccagcttc

SEQ ID NO: 15929 - DNA, 25 bp, synthetic construct
  source 1..25: mol_type = other DNA; mol_type = other DNA
ggctaccagcatctcgtccaacttc

SEQ ID NO: 15930 - DNA, 25 bp, synthetic construct
  source 1..25: mol_type = other DNA; mol_type = other DNA
ggctgccaacatctcatccagcttc

SEQ ID NO: 15931 - DNA, 25 bp, synthetic construct
  source 1..25: mol_type = other DNA; mol_type = other DNA
ggctgccaacatctcgtccaacttc

SEQ ID NO: 15932 - DNA, 25 bp, synthetic construct
  source 1..25: mol_type = other DNA; mol_type = other DNA
caactgccagcatctcgtccagctt

SEQ ID NO: 15933 - DNA, 25 bp, synthetic construct
  source 1..25: mol_type = other DNA; mol_type = other DNA
cagctaccagcatctcgtccagctt

SEQ ID NO: 15934 - DNA, 25 bp, synthetic construct
  source 1..25: mol_type = other DNA; mol_type = other DNA
cagctgccaacatctcgtccagctt

SEQ ID NO: 15935 - DNA, 25 bp, synthetic construct
  source 1..25: mol_type = other DNA; mol_type = other DNA
cagctgccagcatctcatccagctt

SEQ ID NO: 15936 - DNA, 25 bp, synthetic construct
  source 1..25: mol_type = other DNA; mol_type = other DNA
cagctgccagcatctcgtccaactt

SEQ ID NO: 15937 - DNA, 25 bp, synthetic construct
  source 1..25: mol_type = other DNA; mol_type = other DNA
cgactaccagcatctcgtccagctt

SEQ ID NO: 15938 - DNA, 25 bp, synthetic construct
  source 1..25: mol_type = other DNA; mol_type = other DNA
cgactgccaacatctcgtccagctt

SEQ ID NO: 15939 - DNA, 25 bp, synthetic construct
  source 1..25: mol_type = other DNA; mol_type = other DNA
cgactgccagcatctcatccagctt

SEQ ID NO: 15940 - DNA, 25 bp, synthetic construct
  source 1..25: mol_type = other DNA; mol_type = other DNA
cgactgccagcatctcgtccaactt

SEQ ID NO: 15941 - DNA, 25 bp, synthetic construct
  source 1..25: mol_type = other DNA; mol_type = other DNA
cggctaccaacatctcgtccagctt

SEQ ID NO: 15942 - DNA, 25 bp, synthetic construct
  source 1..25: mol_type = other DNA; mol_type = other DNA
cggctaccagcatctcatccagctt

SEQ ID NO: 15943 - DNA, 25 bp, synthetic construct
  source 1..25: mol_type = other DNA; mol_type = other DNA
cggctaccagcatctcgtccaactt

SEQ ID NO: 15944 - DNA, 25 bp, synthetic construct
  source 1..25: mol_type = other DNA; mol_type = other DNA
cggctgccaacatctcatccagctt

SEQ ID NO: 15945 - DNA, 25 bp, synthetic construct
  source 1..25: mol_type = other DNA; mol_type = other DNA
cggctgccaacatctcgtccaactt

SEQ ID NO: 15946 - DNA, 25 bp, synthetic construct
  source 1..25: mol_type = other DNA; mol_type = other DNA
acagctgccagcatctcgtccagct

SEQ ID NO: 15947 - DNA, 25 bp, synthetic construct
  source 1..25: mol_type = other DNA; mol_type = other DNA
acgactgccagcatctcgtccagct

SEQ ID NO: 15948 - DNA, 25 bp, synthetic construct
  source 1..25: mol_type = other DNA; mol_type = other DNA
acggctaccagcatctcgtccagct

SEQ ID NO: 15949 - DNA, 25 bp, synthetic construct
  source 1..25: mol_type = other DNA; mol_type = other DNA
acggctgccaacatctcgtccagct

SEQ ID NO: 15950 - DNA, 25 bp, synthetic construct
  source 1..25: mol_type = other DNA; mol_type = other DNA
acggctgccagcatctcatccagct

SEQ ID NO: 15951 - DNA, 25 bp, synthetic construct
  source 1..25: mol_type = other DNA; mol_type = other DNA
acggctgccagcatctcgtccaact

SEQ ID NO: 15952 - DNA, 25 bp, synthetic construct
  source 1..25: mol_type = other DNA; mol_type = other DNA
gcaactgccagcatctcgtccagct

SEQ ID NO: 15953 - DNA, 25 bp, synthetic construct
  source 1..25: mol_type = other DNA; mol_type = other DNA
gcagctaccagcatctcgtccagct

SEQ ID NO: 15954 - DNA, 25 bp, synthetic construct
  source 1..25: mol_type = other DNA; mol_type = other DNA
gcagctgccaacatctcgtccagct

SEQ ID NO: 15955 - DNA, 25 bp, synthetic construct
  source 1..25: mol_type = other DNA; mol_type = other DNA
gcagctgccagcatctcatccagct

SEQ ID NO: 15956 - DNA, 25 bp, synthetic construct
  source 1..25: mol_type = other DNA; mol_type = other DNA
gcagctgccagcatctcgtccaact

SEQ ID NO: 15957 - DNA, 25 bp, synthetic construct
  source 1..25: mol_type = other DNA; mol_type = other DNA
gcgactaccagcatctcgtccagct

SEQ ID NO: 15958 - DNA, 25 bp, synthetic construct
  source 1..25: mol_type = other DNA; mol_type = other DNA
gcgactgccaacatctcgtccagct

SEQ ID NO: 15959 - DNA, 25 bp, synthetic construct
  source 1..25: mol_type = other DNA; mol_type = other DNA
gcgactgccagcatctcatccagct

SEQ ID NO: 15960 - DNA, 25 bp, synthetic construct
  source 1..25: mol_type = other DNA; mol_type = other DNA
gcgactgccagcatctcgtccaact

SEQ ID NO: 15961 - DNA, 25 bp, synthetic construct
  source 1..25: mol_type = other DNA; mol_type = other DNA
gcggctaccaacatctcgtccagct

SEQ ID NO: 15962 - DNA, 25 bp, synthetic construct
  source 1..25: mol_type = other DNA; mol_type = other DNA
gcggctaccagcatctcatccagct

SEQ ID NO: 15963 - DNA, 25 bp, synthetic construct
  source 1..25: mol_type = other DNA; mol_type = other DNA
gcggctaccagcatctcgtccaact

SEQ ID NO: 15964 - DNA, 25 bp, synthetic construct
  source 1..25: mol_type = other DNA; mol_type = other DNA
gcggctgccaacatctcatccagct

SEQ ID NO: 15965 - DNA, 25 bp, synthetic construct
  source 1..25: mol_type = other DNA; mol_type = other DNA
gcggctgccaacatctcgtccaact

SEQ ID NO: 15966 - DNA, 25 bp, synthetic construct
  source 1..25: mol_type = other DNA; mol_type = other DNA
aacggctgccagcatctcgtccagc

SEQ ID NO: 15967 - DNA, 25 bp, synthetic construct
  source 1..25: mol_type = other DNA; mol_type = other DNA
agcagctgccagcatctcgtccagc

SEQ ID NO: 15968 - DNA, 25 bp, synthetic construct
  source 1..25: mol_type = other DNA; mol_type = other DNA
agcgactgccagcatctcgtccagc

SEQ ID NO: 15969 - DNA, 25 bp, synthetic construct
  source 1..25: mol_type = other DNA; mol_type = other DNA
agcggctaccagcatctcgtccagc

SEQ ID NO: 15970 - DNA, 25 bp, synthetic construct
  source 1..25: mol_type = other DNA; mol_type = other DNA
agcggctgccaacatctcgtccagc

SEQ ID NO: 15971 - DNA, 25 bp, synthetic construct
  source 1..25: mol_type = other DNA; mol_type = other DNA
agcggctgccagcatctcatccagc

SEQ ID NO: 15972 - DNA, 25 bp, synthetic construct
  source 1..25: mol_type = other DNA; mol_type = other DNA
agcggctgccagcatctcgtccaac

SEQ ID NO: 15973 - DNA, 25 bp, synthetic construct
  source 1..25: mol_type = other DNA; mol_type = other DNA
gacagctgccagcatctcgtccagc

SEQ ID NO: 15974 - DNA, 25 bp, synthetic construct
  source 1..25: mol_type = other DNA; mol_type = other DNA
gacgactgccagcatctcgtccagc

SEQ ID NO: 15975 - DNA, 25 bp, synthetic construct
  source 1..25: mol_type = other DNA; mol_type = other DNA
gacggctaccagcatctcgtccagc

SEQ ID NO: 15976 - DNA, 25 bp, synthetic construct
  source 1..25: mol_type = other DNA; mol_type = other DNA
gacggctgccaacatctcgtccagc

SEQ ID NO: 15977 - DNA, 25 bp, synthetic construct
  source 1..25: mol_type = other DNA; mol_type = other DNA
gacggctgccagcatctcatccagc

SEQ ID NO: 15978 - DNA, 25 bp, synthetic construct
  source 1..25: mol_type = other DNA; mol_type = other DNA
gacggctgccagcatctcgtccaac

SEQ ID NO: 15979 - DNA, 25 bp, synthetic construct
  source 1..25: mol_type = other DNA; mol_type = other DNA
ggcaactgccagcatctcgtccagc

SEQ ID NO: 15980 - DNA, 25 bp, synthetic construct
  source 1..25: mol_type = other DNA; mol_type = other DNA
ggcagctaccagcatctcgtccagc

SEQ ID NO: 15981 - DNA, 25 bp, synthetic construct
  source 1..25: mol_type = other DNA; mol_type = other DNA
ggcagctgccaacatctcgtccagc

SEQ ID NO: 15982 - DNA, 25 bp, synthetic construct
  source 1..25: mol_type = other DNA; mol_type = other DNA
ggcagctgccagcatctcatccagc

SEQ ID NO: 15983 - DNA, 25 bp, synthetic construct
  source 1..25: mol_type = other DNA; mol_type = other DNA
ggcagctgccagcatctcgtccaac

SEQ ID NO: 15984 - DNA, 25 bp, synthetic construct
  source 1..25: mol_type = other DNA; mol_type = other DNA
ggcgactaccagcatctcgtccagc

SEQ ID NO: 15985 - DNA, 25 bp, synthetic construct
  source 1..25: mol_type = other DNA; mol_type = other DNA
ggcgactgccaacatctcgtccagc

SEQ ID NO: 15986 - DNA, 25 bp, synthetic construct
  source 1..25: mol_type = other DNA; mol_type = other DNA
ggcgactgccagcatctcatccagc

SEQ ID NO: 15987 - DNA, 25 bp, synthetic construct
  source 1..25: mol_type = other DNA; mol_type = other DNA
ggcgactgccagcatctcgtccaac

SEQ ID NO: 15988 - DNA, 25 bp, synthetic construct
  source 1..25: mol_type = other DNA; mol_type = other DNA
ggcggctaccaacatctcgtccagc

SEQ ID NO: 15989 - DNA, 25 bp, synthetic construct
  source 1..25: mol_type = other DNA; mol_type = other DNA
ggcggctaccagcatctcatccagc

SEQ ID NO: 15990 - DNA, 25 bp, synthetic construct
  source 1..25: mol_type = other DNA; mol_type = other DNA
ggcggctaccagcatctcgtccaac

SEQ ID NO: 15991 - DNA, 25 bp, synthetic construct
  source 1..25: mol_type = other DNA; mol_type = other DNA
ggcggctgccaacatctcatccagc

SEQ ID NO: 15992 - DNA, 25 bp, synthetic construct
  source 1..25: mol_type = other DNA; mol_type = other DNA
ggcggctgccaacatctcgtccaac

SEQ ID NO: 15993 - DNA, 25 bp, synthetic construct
  source 1..25: mol_type = other DNA; mol_type = other DNA
caacggctgccagcatctcgtccag

SEQ ID NO: 15994 - DNA, 25 bp, synthetic construct
  source 1..25: mol_type = other DNA; mol_type = other DNA
cagcagctgccagcatctcgtccag

SEQ ID NO: 15995 - DNA, 25 bp, synthetic construct
  source 1..25: mol_type = other DNA; mol_type = other DNA
cagcgactgccagcatctcgtccag

SEQ ID NO: 15996 - DNA, 25 bp, synthetic construct
  source 1..25: mol_type = other DNA; mol_type = other DNA
cagcggctaccagcatctcgtccag

SEQ ID NO: 15997 - DNA, 25 bp, synthetic construct
  source 1..25: mol_type = other DNA; mol_type = other DNA
cagcggctgccaacatctcgtccag

SEQ ID NO: 15998 - DNA, 25 bp, synthetic construct
  source 1..25: mol_type = other DNA; mol_type = other DNA
cagcggctgccagcatctcatccag

SEQ ID NO: 15999 - DNA, 25 bp, synthetic construct
  source 1..25: mol_type = other DNA; mol_type = other DNA
cagcggctgccagcatctcgtccaa

SEQ ID NO: 16000 - DNA, 25 bp, synthetic construct
  source 1..25: mol_type = other DNA; mol_type = other DNA
cgacagctgccagcatctcgtccag

SEQ ID NO: 16001 - DNA, 25 bp, synthetic construct
  source 1..25: mol_type = other DNA; mol_type = other DNA
cgacgactgccagcatctcgtccag

SEQ ID NO: 16002 - DNA, 25 bp, synthetic construct
  source 1..25: mol_type = other DNA; mol_type = other DNA
cgacggctaccagcatctcgtccag

SEQ ID NO: 16003 - DNA, 25 bp, synthetic construct
  source 1..25: mol_type = other DNA; mol_type = other DNA
cgacggctgccaacatctcgtccag

SEQ ID NO: 16004 - DNA, 25 bp, synthetic construct
  source 1..25: mol_type = other DNA; mol_type = other DNA
cgacggctgccagcatctcatccag

SEQ ID NO: 16005 - DNA, 25 bp, synthetic construct
  source 1..25: mol_type = other DNA; mol_type = other DNA
cgacggctgccagcatctcgtccaa

SEQ ID NO: 16006 - DNA, 25 bp, synthetic construct
  source 1..25: mol_type = other DNA; mol_type = other DNA
cggcaactgccagcatctcgtccag

SEQ ID NO: 16007 - DNA, 25 bp, synthetic construct
  source 1..25: mol_type = other DNA; mol_type = other DNA
cggcagctaccagcatctcgtccag

SEQ ID NO: 16008 - DNA, 25 bp, synthetic construct
  source 1..25: mol_type = other DNA; mol_type = other DNA
cggcagctgccaacatctcgtccag

SEQ ID NO: 16009 - DNA, 25 bp, synthetic construct
  source 1..25: mol_type = other DNA; mol_type = other DNA
cggcagctgccagcatctcatccag

SEQ ID NO: 16010 - DNA, 25 bp, synthetic construct
  source 1..25: mol_type = other DNA; mol_type = other DNA
cggcagctgccagcatctcgtccaa

SEQ ID NO: 16011 - DNA, 25 bp, synthetic construct
  source 1..25: mol_type = other DNA; mol_type = other DNA
cggcgactaccagcatctcgtccag

SEQ ID NO: 16012 - DNA, 25 bp, synthetic construct
  source 1..25: mol_type = other DNA; mol_type = other DNA
cggcgactgccaacatctcgtccag

SEQ ID NO: 16013 - DNA, 25 bp, synthetic construct
  source 1..25: mol_type = other DNA; mol_type = other DNA
cggcgactgccagcatctcatccag

SEQ ID NO: 16014 - DNA, 25 bp, synthetic construct
  source 1..25: mol_type = other DNA; mol_type = other DNA
cggcgactgccagcatctcgtccaa

SEQ ID NO: 16015 - DNA, 25 bp, synthetic construct
  source 1..25: mol_type = other DNA; mol_type = other DNA
cggcggctaccaacatctcgtccag

SEQ ID NO: 16016 - DNA, 25 bp, synthetic construct
  source 1..25: mol_type = other DNA; mol_type = other DNA
cggcggctaccagcatctcatccag

SEQ ID NO: 16017 - DNA, 25 bp, synthetic construct
  source 1..25: mol_type = other DNA; mol_type = other DNA
cggcggctaccagcatctcgtccaa

SEQ ID NO: 16018 - DNA, 25 bp, synthetic construct
  source 1..25: mol_type = other DNA; mol_type = other DNA
cggcggctgccaacatctcatccag

SEQ ID NO: 16019 - DNA, 25 bp, synthetic construct
  source 1..25: mol_type = other DNA; mol_type = other DNA
cggcggctgccaacatctcgtccaa

SEQ ID NO: 16020 - DNA, 25 bp, synthetic construct
  source 1..25: mol_type = other DNA; mol_type = other DNA
acagcggctgccagcatctcgtcca

SEQ ID NO: 16021 - DNA, 25 bp, synthetic construct
  source 1..25: mol_type = other DNA; mol_type = other DNA
acgacggctgccagcatctcgtcca

SEQ ID NO: 16022 - DNA, 25 bp, synthetic construct
  source 1..25: mol_type = other DNA; mol_type = other DNA
acggcagctgccagcatctcgtcca

SEQ ID NO: 16023 - DNA, 25 bp, synthetic construct
  source 1..25: mol_type = other DNA; mol_type = other DNA
acggcgactgccagcatctcgtcca

SEQ ID NO: 16024 - DNA, 25 bp, synthetic construct
  source 1..25: mol_type = other DNA; mol_type = other DNA
acggcggctaccagcatctcgtcca

SEQ ID NO: 16025 - DNA, 25 bp, synthetic construct
  source 1..25: mol_type = other DNA; mol_type = other DNA
acggcggctgccaacatctcgtcca

SEQ ID NO: 16026 - DNA, 25 bp, synthetic construct
  source 1..25: mol_type = other DNA; mol_type = other DNA
acggcggctgccagcatctcatcca

SEQ ID NO: 16027 - DNA, 25 bp, synthetic construct
  source 1..25: mol_type = other DNA; mol_type = other DNA
gcaacggctgccagcatctcgtcca

SEQ ID NO: 16028 - DNA, 25 bp, synthetic construct
  source 1..25: mol_type = other DNA; mol_type = other DNA
gcagcagctgccagcatctcgtcca

SEQ ID NO: 16029 - DNA, 25 bp, synthetic construct
  source 1..25: mol_type = other DNA; mol_type = other DNA
gcagcgactgccagcatctcgtcca

SEQ ID NO: 16030 - DNA, 25 bp, synthetic construct
  source 1..25: mol_type = other DNA; mol_type = other DNA
gcagcggctaccagcatctcgtcca

SEQ ID NO: 16031 - DNA, 25 bp, synthetic construct
  source 1..25: mol_type = other DNA; mol_type = other DNA
gcagcggctgccaacatctcgtcca

SEQ ID NO: 16032 - DNA, 25 bp, synthetic construct
  source 1..25: mol_type = other DNA; mol_type = other DNA
gcagcggctgccagcatctcatcca

SEQ ID NO: 16033 - DNA, 25 bp, synthetic construct
  source 1..25: mol_type = other DNA; mol_type = other DNA
gcgacagctgccagcatctcgtcca

SEQ ID NO: 16034 - DNA, 25 bp, synthetic construct
  source 1..25: mol_type = other DNA; mol_type = other DNA
gcgacgactgccagcatctcgtcca

SEQ ID NO: 16035 - DNA, 25 bp, synthetic construct
  source 1..25: mol_type = other DNA; mol_type = other DNA
gcgacggctaccagcatctcgtcca

SEQ ID NO: 16036 - DNA, 25 bp, synthetic construct
  source 1..25: mol_type = other DNA; mol_type = other DNA
gcgacggctgccaacatctcgtcca

SEQ ID NO: 16037 - DNA, 25 bp, synthetic construct
  source 1..25: mol_type = other DNA; mol_type = other DNA
gcgacggctgccagcatctcatcca

SEQ ID NO: 16038 - DNA, 25 bp, synthetic construct
  source 1..25: mol_type = other DNA; mol_type = other DNA
gcggcaactgccagcatctcgtcca

SEQ ID NO: 16039 - DNA, 25 bp, synthetic construct
  source 1..25: mol_type = other DNA; mol_type = other DNA
gcggcagctaccagcatctcgtcca

SEQ ID NO: 16040 - DNA, 25 bp, synthetic construct
  source 1..25: mol_type = other DNA; mol_type = other DNA
gcggcagctgccaacatctcgtcca

SEQ ID NO: 16041 - DNA, 25 bp, synthetic construct
  source 1..25: mol_type = other DNA; mol_type = other DNA
gcggcagctgccagcatctcatcca

SEQ ID NO: 16042 - DNA, 25 bp, synthetic construct
  source 1..25: mol_type = other DNA; mol_type = other DNA
gcggcgactaccagcatctcgtcca

SEQ ID NO: 16043 - DNA, 25 bp, synthetic construct
  source 1..25: mol_type = other DNA; mol_type = other DNA
gcggcgactgccaacatctcgtcca

SEQ ID NO: 16044 - DNA, 25 bp, synthetic construct
  source 1..25: mol_type = other DNA; mol_type = other DNA
gcggcgactgccagcatctcatcca

SEQ ID NO: 16045 - DNA, 25 bp, synthetic construct
  source 1..25: mol_type = other DNA; mol_type = other DNA
gcggcggctaccaacatctcgtcca

SEQ ID NO: 16046 - DNA, 25 bp, synthetic construct
  source 1..25: mol_type = other DNA; mol_type = other DNA
gcggcggctaccagcatctcatcca

SEQ ID NO: 16047 - DNA, 25 bp, synthetic construct
  source 1..25: mol_type = other DNA; mol_type = other DNA
tacagcggctgccagcatctcgtcc

SEQ ID NO: 16048 - DNA, 25 bp, synthetic construct
  source 1..25: mol_type = other DNA; mol_type = other DNA
tacgacggctgccagcatctcgtcc

SEQ ID NO: 16049 - DNA, 25 bp, synthetic construct
  source 1..25: mol_type = other DNA; mol_type = other DNA
tacggcagctgccagcatctcgtcc

SEQ ID NO: 16050 - DNA, 25 bp, synthetic construct
  source 1..25: mol_type = other DNA; mol_type = other DNA
tacggcgactgccagcatctcgtcc

SEQ ID NO: 16051 - DNA, 25 bp, synthetic construct
  source 1..25: mol_type = other DNA; mol_type = other DNA
tacggcggctaccagcatctcgtcc

SEQ ID NO: 16052 - DNA, 25 bp, synthetic construct
  source 1..25: mol_type = other DNA; mol_type = other DNA
tacggcggctgccaacatctcgtcc

SEQ ID NO: 16053 - DNA, 25 bp, synthetic construct
  source 1..25: mol_type = other DNA; mol_type = other DNA
tacggcggctgccagcatctcatcc

SEQ ID NO: 16054 - DNA, 25 bp, synthetic construct
  source 1..25: mol_type = other DNA; mol_type = other DNA
tgcaacggctgccagcatctcgtcc

SEQ ID NO: 16055 - DNA, 25 bp, synthetic construct
  source 1..25: mol_type = other DNA; mol_type = other DNA
tgcagcagctgccagcatctcgtcc

SEQ ID NO: 16056 - DNA, 25 bp, synthetic construct
  source 1..25: mol_type = other DNA; mol_type = other DNA
tgcagcgactgccagcatctcgtcc

SEQ ID NO: 16057 - DNA, 25 bp, synthetic construct
  source 1..25: mol_type = other DNA; mol_type = other DNA
tgcagcggctaccagcatctcgtcc

SEQ ID NO: 16058 - DNA, 25 bp, synthetic construct
  source 1..25: mol_type = other DNA; mol_type = other DNA
tgcagcggctgccaacatctcgtcc

SEQ ID NO: 16059 - DNA, 25 bp, synthetic construct
  source 1..25: mol_type = other DNA; mol_type = other DNA
tgcagcggctgccagcatctcatcc

SEQ ID NO: 16060 - DNA, 25 bp, synthetic construct
  source 1..25: mol_type = other DNA; mol_type = other DNA
tgcgacagctgccagcatctcgtcc

SEQ ID NO: 16061 - DNA, 25 bp, synthetic construct
  source 1..25: mol_type = other DNA; mol_type = other DNA
tgcgacgactgccagcatctcgtcc

SEQ ID NO: 16062 - DNA, 25 bp, synthetic construct
  source 1..25: mol_type = other DNA; mol_type = other DNA
tgcgacggctaccagcatctcgtcc

SEQ ID NO: 16063 - DNA, 25 bp, synthetic construct
  source 1..25: mol_type = other DNA; mol_type = other DNA
tgcgacggctgccaacatctcgtcc

SEQ ID NO: 16064 - DNA, 25 bp, synthetic construct
  source 1..25: mol_type = other DNA; mol_type = other DNA
tgcgacggctgccagcatctcatcc

SEQ ID NO: 16065 - DNA, 25 bp, synthetic construct
  source 1..25: mol_type = other DNA; mol_type = other DNA
tgcggcaactgccagcatctcgtcc

SEQ ID NO: 16066 - DNA, 25 bp, synthetic construct
  source 1..25: mol_type = other DNA; mol_type = other DNA
tgcggcagctaccagcatctcgtcc

SEQ ID NO: 16067 - DNA, 25 bp, synthetic construct
  source 1..25: mol_type = other DNA; mol_type = other DNA
tgcggcagctgccaacatctcgtcc

SEQ ID NO: 16068 - DNA, 25 bp, synthetic construct
  source 1..25: mol_type = other DNA; mol_type = other DNA
tgcggcagctgccagcatctcatcc

SEQ ID NO: 16069 - DNA, 25 bp, synthetic construct
  source 1..25: mol_type = other DNA; mol_type = other DNA
tgcggcgactaccagcatctcgtcc

SEQ ID NO: 16070 - DNA, 25 bp, synthetic construct
  source 1..25: mol_type = other DNA; mol_type = other DNA
tgcggcgactgccaacatctcgtcc

SEQ ID NO: 16071 - DNA, 25 bp, synthetic construct
  source 1..25: mol_type = other DNA; mol_type = other DNA
tgcggcgactgccagcatctcatcc

SEQ ID NO: 16072 - DNA, 25 bp, synthetic construct
  source 1..25: mol_type = other DNA; mol_type = other DNA
tgcggcggctaccaacatctcgtcc

SEQ ID NO: 16073 - DNA, 25 bp, synthetic construct
  source 1..25: mol_type = other DNA; mol_type = other DNA
tgcggcggctaccagcatctcatcc

SEQ ID NO: 16074 - DNA, 25 bp, synthetic construct
  source 1..25: mol_type = other DNA; mol_type = other DNA
ctacagcggctgccagcatctcgtc

SEQ ID NO: 16075 - DNA, 25 bp, synthetic construct
  source 1..25: mol_type = other DNA; mol_type = other DNA
ctacgacggctgccagcatctcgtc

SEQ ID NO: 16076 - DNA, 25 bp, synthetic construct
  source 1..25: mol_type = other DNA; mol_type = other DNA
ctacggcagctgccagcatctcgtc

SEQ ID NO: 16077 - DNA, 25 bp, synthetic construct
  source 1..25: mol_type = other DNA; mol_type = other DNA
ctacggcgactgccagcatctcgtc

SEQ ID NO: 16078 - DNA, 25 bp, synthetic construct
  source 1..25: mol_type = other DNA; mol_type = other DNA
ctacggcggctaccagcatctcgtc

SEQ ID NO: 16079 - DNA, 25 bp, synthetic construct
  source 1..25: mol_type = other DNA; mol_type = other DNA
ctacggcggctgccaacatctcgtc

SEQ ID NO: 16080 - DNA, 25 bp, synthetic construct
  source 1..25: mol_type = other DNA; mol_type = other DNA
ctacggcggctgccagcatctcatc

SEQ ID NO: 16081 - DNA, 25 bp, synthetic construct
  source 1..25: mol_type = other DNA; mol_type = other DNA
ctgcaacggctgccagcatctcgtc

SEQ ID NO: 16082 - DNA, 25 bp, synthetic construct
  source 1..25: mol_type = other DNA; mol_type = other DNA
ctgcagcagctgccagcatctcgtc

SEQ ID NO: 16083 - DNA, 25 bp, synthetic construct
  source 1..25: mol_type = other DNA; mol_type = other DNA
ctgcagcgactgccagcatctcgtc

SEQ ID NO: 16084 - DNA, 25 bp, synthetic construct
  source 1..25: mol_type = other DNA; mol_type = other DNA
ctgcagcggctaccagcatctcgtc

SEQ ID NO: 16085 - DNA, 25 bp, synthetic construct
  source 1..25: mol_type = other DNA; mol_type = other DNA
ctgcagcggctgccaacatctcgtc

SEQ ID NO: 16086 - DNA, 25 bp, synthetic construct
  source 1..25: mol_type = other DNA; mol_type = other DNA
ctgcagcggctgccagcatctcatc

SEQ ID NO: 16087 - DNA, 25 bp, synthetic construct
  source 1..25: mol_type = other DNA; mol_type = other DNA
ctgcgacagctgccagcatctcgtc

SEQ ID NO: 16088 - DNA, 25 bp, synthetic construct
  source 1..25: mol_type = other DNA; mol_type = other DNA
ctgcgacgactgccagcatctcgtc

SEQ ID NO: 16089 - DNA, 25 bp, synthetic construct
  source 1..25: mol_type = other DNA; mol_type = other DNA
ctgcgacggctaccagcatctcgtc

SEQ ID NO: 16090 - DNA, 25 bp, synthetic construct
  source 1..25: mol_type = other DNA; mol_type = other DNA
ctgcgacggctgccaacatctcgtc

SEQ ID NO: 16091 - DNA, 25 bp, synthetic construct
  source 1..25: mol_type = other DNA; mol_type = other DNA
ctgcgacggctgccagcatctcatc

SEQ ID NO: 16092 - DNA, 25 bp, synthetic construct
  source 1..25: mol_type = other DNA; mol_type = other DNA
ctgcggcaactgccagcatctcgtc

SEQ ID NO: 16093 - DNA, 25 bp, synthetic construct
  source 1..25: mol_type = other DNA; mol_type = other DNA
ctgcggcagctaccagcatctcgtc

SEQ ID NO: 16094 - DNA, 25 bp, synthetic construct
  source 1..25: mol_type = other DNA; mol_type = other DNA
ctgcggcagctgccaacatctcgtc

SEQ ID NO: 16095 - DNA, 25 bp, synthetic construct
  source 1..25: mol_type = other DNA; mol_type = other DNA
ctgcggcagctgccagcatctcatc

SEQ ID NO: 16096 - DNA, 25 bp, synthetic construct
  source 1..25: mol_type = other DNA; mol_type = other DNA
ctgcggcgactaccagcatctcgtc

SEQ ID NO: 16097 - DNA, 25 bp, synthetic construct
  source 1..25: mol_type = other DNA; mol_type = other DNA
ctgcggcgactgccaacatctcgtc

SEQ ID NO: 16098 - DNA, 25 bp, synthetic construct
  source 1..25: mol_type = other DNA; mol_type = other DNA
ctgcggcgactgccagcatctcatc

SEQ ID NO: 16099 - DNA, 25 bp, synthetic construct
  source 1..25: mol_type = other DNA; mol_type = other DNA
ctgcggcggctaccaacatctcgtc

SEQ ID NO: 16100 - DNA, 25 bp, synthetic construct
  source 1..25: mol_type = other DNA; mol_type = other DNA
ctgcggcggctaccagcatctcatc

SEQ ID NO: 16101 - DNA, 25 bp, synthetic construct
  source 1..25: mol_type = other DNA; mol_type = other DNA
tctacagcggctgccagcatctcgt

SEQ ID NO: 16102 - DNA, 25 bp, synthetic construct
  source 1..25: mol_type = other DNA; mol_type = other DNA
tctacgacggctgccagcatctcgt

SEQ ID NO: 16103 - DNA, 25 bp, synthetic construct
  source 1..25: mol_type = other DNA; mol_type = other DNA
tctacggcagctgccagcatctcgt

SEQ ID NO: 16104 - DNA, 25 bp, synthetic construct
  source 1..25: mol_type = other DNA; mol_type = other DNA
tctacggcgactgccagcatctcgt

SEQ ID NO: 16105 - DNA, 25 bp, synthetic construct
  source 1..25: mol_type = other DNA; mol_type = other DNA
tctacggcggctaccagcatctcgt

SEQ ID NO: 16106 - DNA, 25 bp, synthetic construct
  source 1..25: mol_type = other DNA; mol_type = other DNA
tctacggcggctgccaacatctcgt

SEQ ID NO: 16107 - DNA, 25 bp, synthetic construct
  source 1..25: mol_type = other DNA; mol_type = other DNA
tctacggcggctgccagcatctcat

SEQ ID NO: 16108 - DNA, 25 bp, synthetic construct
  source 1..25: mol_type = other DNA; mol_type = other DNA
tctgcaacggctgccagcatctcgt

SEQ ID NO: 16109 - DNA, 25 bp, synthetic construct
  source 1..25: mol_type = other DNA; mol_type = other DNA
tctgcagcagctgccagcatctcgt

SEQ ID NO: 16110 - DNA, 25 bp, synthetic construct
  source 1..25: mol_type = other DNA; mol_type = other DNA
tctgcagcgactgccagcatctcgt

SEQ ID NO: 16111 - DNA, 25 bp, synthetic construct
  source 1..25: mol_type = other DNA; mol_type = other DNA
tctgcagcggctaccagcatctcgt

SEQ ID NO: 16112 - DNA, 25 bp, synthetic construct
  source 1..25: mol_type = other DNA; mol_type = other DNA
tctgcagcggctgccaacatctcgt

SEQ ID NO: 16113 - DNA, 25 bp, synthetic construct
  source 1..25: mol_type = other DNA; mol_type = other DNA
tctgcagcggctgccagcatctcat

SEQ ID NO: 16114 - DNA, 25 bp, synthetic construct
  source 1..25: mol_type = other DNA; mol_type = other DNA
tctgcgacagctgccagcatctcgt

SEQ ID NO: 16115 - DNA, 25 bp, synthetic construct
  source 1..25: mol_type = other DNA; mol_type = other DNA
tctgcgacgactgccagcatctcgt

SEQ ID NO: 16116 - DNA, 25 bp, synthetic construct
  source 1..25: mol_type = other DNA; mol_type = other DNA
tctgcgacggctaccagcatctcgt

SEQ ID NO: 16117 - DNA, 25 bp, synthetic construct
  source 1..25: mol_type = other DNA; mol_type = other DNA
tctgcgacggctgccaacatctcgt

SEQ ID NO: 16118 - DNA, 25 bp, synthetic construct
  source 1..25: mol_type = other DNA; mol_type = other DNA
tctgcgacggctgccagcatctcat

SEQ ID NO: 16119 - DNA, 25 bp, synthetic construct
  source 1..25: mol_type = other DNA; mol_type = other DNA
tctgcggcaactgccagcatctcgt

SEQ ID NO: 16120 - DNA, 25 bp, synthetic construct
  source 1..25: mol_type = other DNA; mol_type = other DNA
tctgcggcagctaccagcatctcgt

SEQ ID NO: 16121 - DNA, 25 bp, synthetic construct
  source 1..25: mol_type = other DNA; mol_type = other DNA
tctgcggcagctgccaacatctcgt

SEQ ID NO: 16122 - DNA, 25 bp, synthetic construct
  source 1..25: mol_type = other DNA; mol_type = other DNA
tctgcggcagctgccagcatctcat

SEQ ID NO: 16123 - DNA, 25 bp, synthetic construct
  source 1..25: mol_type = other DNA; mol_type = other DNA
tctgcggcgactaccagcatctcgt

SEQ ID NO: 16124 - DNA, 25 bp, synthetic construct
  source 1..25: mol_type = other DNA; mol_type = other DNA
tctgcggcgactgccaacatctcgt

SEQ ID NO: 16125 - DNA, 25 bp, synthetic construct
  source 1..25: mol_type = other DNA; mol_type = other DNA
tctgcggcgactgccagcatctcat

SEQ ID NO: 16126 - DNA, 25 bp, synthetic construct
  source 1..25: mol_type = other DNA; mol_type = other DNA
tctgcggcggctaccaacatctcgt

SEQ ID NO: 16127 - DNA, 25 bp, synthetic construct
  source 1..25: mol_type = other DNA; mol_type = other DNA
tctgcggcggctaccagcatctcat

SEQ ID NO: 16128 - DNA, 25 bp, synthetic construct
  source 1..25: mol_type = other DNA; mol_type = other DNA
ctctacagcggctgccagcatctcg

SEQ ID NO: 16129 - DNA, 25 bp, synthetic construct
  source 1..25: mol_type = other DNA; mol_type = other DNA
ctctacgacggctgccagcatctcg

SEQ ID NO: 16130 - DNA, 25 bp, synthetic construct
  source 1..25: mol_type = other DNA; mol_type = other DNA
ctctacggcagctgccagcatctcg

SEQ ID NO: 16131 - DNA, 25 bp, synthetic construct
  source 1..25: mol_type = other DNA; mol_type = other DNA
ctctacggcgactgccagcatctcg

SEQ ID NO: 16132 - DNA, 25 bp, synthetic construct
  source 1..25: mol_type = other DNA; mol_type = other DNA
ctctacggcggctaccagcatctcg

SEQ ID NO: 16133 - DNA, 25 bp, synthetic construct
  source 1..25: mol_type = other DNA; mol_type = other DNA
ctctacggcggctgccaacatctcg

SEQ ID NO: 16134 - DNA, 25 bp, synthetic construct
  source 1..25: mol_type = other DNA; mol_type = other DNA
ctctacggcggctgccagcatctca

SEQ ID NO: 16135 - DNA, 25 bp, synthetic construct
  source 1..25: mol_type = other DNA; mol_type = other DNA
ctctgcaacggctgccagcatctcg

SEQ ID NO: 16136 - DNA, 25 bp, synthetic construct
  source 1..25: mol_type = other DNA; mol_type = other DNA
ctctgcagcagctgccagcatctcg

SEQ ID NO: 16137 - DNA, 25 bp, synthetic construct
  source 1..25: mol_type = other DNA; mol_type = other DNA
ctctgcagcgactgccagcatctcg

SEQ ID NO: 16138 - DNA, 25 bp, synthetic construct
  source 1..25: mol_type = other DNA; mol_type = other DNA
ctctgcagcggctaccagcatctcg

SEQ ID NO: 16139 - DNA, 25 bp, synthetic construct
  source 1..25: mol_type = other DNA; mol_type = other DNA
ctctgcagcggctgccaacatctcg

SEQ ID NO: 16140 - DNA, 25 bp, synthetic construct
  source 1..25: mol_type = other DNA; mol_type = other DNA
ctctgcagcggctgccagcatctca

SEQ ID NO: 16141 - DNA, 25 bp, synthetic construct
  source 1..25: mol_type = other DNA; mol_type = other DNA
ctctgcgacagctgccagcatctcg

SEQ ID NO: 16142 - DNA, 25 bp, synthetic construct
  source 1..25: mol_type = other DNA; mol_type = other DNA
ctctgcgacgactgccagcatctcg

SEQ ID NO: 16143 - DNA, 25 bp, synthetic construct
  source 1..25: mol_type = other DNA; mol_type = other DNA
ctctgcgacggctaccagcatctcg

SEQ ID NO: 16144 - DNA, 25 bp, synthetic construct
  source 1..25: mol_type = other DNA; mol_type = other DNA
ctctgcgacggctgccaacatctcg

SEQ ID NO: 16145 - DNA, 25 bp, synthetic construct
  source 1..25: mol_type = other DNA; mol_type = other DNA
ctctgcgacggctgccagcatctca

SEQ ID NO: 16146 - DNA, 25 bp, synthetic construct
  source 1..25: mol_type = other DNA; mol_type = other DNA
ctctgcggcaactgccagcatctcg

SEQ ID NO: 16147 - DNA, 25 bp, synthetic construct
  source 1..25: mol_type = other DNA; mol_type = other DNA
ctctgcggcagctaccagcatctcg

SEQ ID NO: 16148 - DNA, 25 bp, synthetic construct
  source 1..25: mol_type = other DNA; mol_type = other DNA
ctctgcggcagctgccaacatctcg

SEQ ID NO: 16149 - DNA, 25 bp, synthetic construct
  source 1..25: mol_type = other DNA; mol_type = other DNA
ctctgcggcagctgccagcatctca

SEQ ID NO: 16150 - DNA, 25 bp, synthetic construct
  source 1..25: mol_type = other DNA; mol_type = other DNA
ctctgcggcgactaccagcatctcg

SEQ ID NO: 16151 - DNA, 25 bp, synthetic construct
  source 1..25: mol_type = other DNA; mol_type = other DNA
ctctgcggcgactgccaacatctcg

SEQ ID NO: 16152 - DNA, 25 bp, synthetic construct
  source 1..25: mol_type = other DNA; mol_type = other DNA
ctctgcggcgactgccagcatctca

SEQ ID NO: 16153 - DNA, 25 bp, synthetic construct
  source 1..25: mol_type = other DNA; mol_type = other DNA
ctctgcggcggctaccaacatctcg

SEQ ID NO: 16154 - DNA, 25 bp, synthetic construct
  source 1..25: mol_type = other DNA; mol_type = other DNA
ctctgcggcggctaccagcatctca

SEQ ID NO: 16155 - DNA, 25 bp, synthetic construct
  source 1..25: mol_type = other DNA; mol_type = other DNA
actctacggcggctgccagcatctc

SEQ ID NO: 16156 - DNA, 25 bp, synthetic construct
  source 1..25: mol_type = other DNA; mol_type = other DNA
actctgcagcggctgccagcatctc

SEQ ID NO: 16157 - DNA, 25 bp, synthetic construct
  source 1..25: mol_type = other DNA; mol_type = other DNA
actctgcgacggctgccagcatctc

SEQ ID NO: 16158 - DNA, 25 bp, synthetic construct
  source 1..25: mol_type = other DNA; mol_type = other DNA
actctgcggcagctgccagcatctc

SEQ ID NO: 16159 - DNA, 25 bp, synthetic construct
  source 1..25: mol_type = other DNA; mol_type = other DNA
actctgcggcgactgccagcatctc

SEQ ID NO: 16160 - DNA, 25 bp, synthetic construct
  source 1..25: mol_type = other DNA; mol_type = other DNA
actctgcggcggctaccagcatctc

SEQ ID NO: 16161 - DNA, 25 bp, synthetic construct
  source 1..25: mol_type = other DNA; mol_type = other DNA
actctgcggcggctgccaacatctc

SEQ ID NO: 16162 - DNA, 25 bp, synthetic construct
  source 1..25: mol_type = other DNA; mol_type = other DNA
gctctacagcggctgccagcatctc

SEQ ID NO: 16163 - DNA, 25 bp, synthetic construct
  source 1..25: mol_type = other DNA; mol_type = other DNA
gctctacgacggctgccagcatctc

SEQ ID NO: 16164 - DNA, 25 bp, synthetic construct
  source 1..25: mol_type = other DNA; mol_type = other DNA
gctctacggcagctgccagcatctc

SEQ ID NO: 16165 - DNA, 25 bp, synthetic construct
  source 1..25: mol_type = other DNA; mol_type = other DNA
gctctacggcgactgccagcatctc

SEQ ID NO: 16166 - DNA, 25 bp, synthetic construct
  source 1..25: mol_type = other DNA; mol_type = other DNA
gctctacggcggctaccagcatctc

SEQ ID NO: 16167 - DNA, 25 bp, synthetic construct
  source 1..25: mol_type = other DNA; mol_type = other DNA
gctctacggcggctgccaacatctc

SEQ ID NO: 16168 - DNA, 25 bp, synthetic construct
  source 1..25: mol_type = other DNA; mol_type = other DNA
gctctgcaacggctgccagcatctc

SEQ ID NO: 16169 - DNA, 25 bp, synthetic construct
  source 1..25: mol_type = other DNA; mol_type = other DNA
gctctgcagcagctgccagcatctc

SEQ ID NO: 16170 - DNA, 25 bp, synthetic construct
  source 1..25: mol_type = other DNA; mol_type = other DNA
gctctgcagcgactgccagcatctc

SEQ ID NO: 16171 - DNA, 25 bp, synthetic construct
  source 1..25: mol_type = other DNA; mol_type = other DNA
gctctgcagcggctaccagcatctc

SEQ ID NO: 16172 - DNA, 25 bp, synthetic construct
  source 1..25: mol_type = other DNA; mol_type = other DNA
gctctgcagcggctgccaacatctc

SEQ ID NO: 16173 - DNA, 25 bp, synthetic construct
  source 1..25: mol_type = other DNA; mol_type = other DNA
gctctgcgacagctgccagcatctc

SEQ ID NO: 16174 - DNA, 25 bp, synthetic construct
  source 1..25: mol_type = other DNA; mol_type = other DNA
gctctgcgacgactgccagcatctc

SEQ ID NO: 16175 - DNA, 25 bp, synthetic construct
  source 1..25: mol_type = other DNA; mol_type = other DNA
gctctgcgacggctaccagcatctc

SEQ ID NO: 16176 - DNA, 25 bp, synthetic construct
  source 1..25: mol_type = other DNA; mol_type = other DNA
gctctgcgacggctgccaacatctc

SEQ ID NO: 16177 - DNA, 25 bp, synthetic construct
  source 1..25: mol_type = other DNA; mol_type = other DNA
gctctgcggcaactgccagcatctc

SEQ ID NO: 16178 - DNA, 25 bp, synthetic construct
  source 1..25: mol_type = other DNA; mol_type = other DNA
gctctgcggcagctaccagcatctc

SEQ ID NO: 16179 - DNA, 25 bp, synthetic construct
  source 1..25: mol_type = other DNA; mol_type = other DNA
gctctgcggcagctgccaacatctc

SEQ ID NO: 16180 - DNA, 25 bp, synthetic construct
  source 1..25: mol_type = other DNA; mol_type = other DNA
gctctgcggcgactaccagcatctc

SEQ ID NO: 16181 - DNA, 25 bp, synthetic construct
  source 1..25: mol_type = other DNA; mol_type = other DNA
gctctgcggcgactgccaacatctc

SEQ ID NO: 16182 - DNA, 25 bp, synthetic construct
  source 1..25: mol_type = other DNA; mol_type = other DNA
aactctgcggcggctgccagcatct

SEQ ID NO: 16183 - DNA, 25 bp, synthetic construct
  source 1..25: mol_type = other DNA; mol_type = other DNA
agctctacggcggctgccagcatct

SEQ ID NO: 16184 - DNA, 25 bp, synthetic construct
  source 1..25: mol_type = other DNA; mol_type = other DNA
agctctgcagcggctgccagcatct

SEQ ID NO: 16185 - DNA, 25 bp, synthetic construct
  source 1..25: mol_type = other DNA; mol_type = other DNA
agctctgcgacggctgccagcatct

SEQ ID NO: 16186 - DNA, 25 bp, synthetic construct
  source 1..25: mol_type = other DNA; mol_type = other DNA
agctctgcggcagctgccagcatct

SEQ ID NO: 16187 - DNA, 25 bp, synthetic construct
  source 1..25: mol_type = other DNA; mol_type = other DNA
agctctgcggcgactgccagcatct

SEQ ID NO: 16188 - DNA, 25 bp, synthetic construct
  source 1..25: mol_type = other DNA; mol_type = other DNA
agctctgcggcggctaccagcatct

SEQ ID NO: 16189 - DNA, 25 bp, synthetic construct
  source 1..25: mol_type = other DNA; mol_type = other DNA
agctctgcggcggctgccaacatct

SEQ ID NO: 16190 - DNA, 25 bp, synthetic construct
  source 1..25: mol_type = other DNA; mol_type = other DNA
gactctacggcggctgccagcatct

SEQ ID NO: 16191 - DNA, 25 bp, synthetic construct
  source 1..25: mol_type = other DNA; mol_type = other DNA
gactctgcagcggctgccagcatct

SEQ ID NO: 16192 - DNA, 25 bp, synthetic construct
  source 1..25: mol_type = other DNA; mol_type = other DNA
gactctgcgacggctgccagcatct

SEQ ID NO: 16193 - DNA, 25 bp, synthetic construct
  source 1..25: mol_type = other DNA; mol_type = other DNA
gactctgcggcagctgccagcatct

SEQ ID NO: 16194 - DNA, 25 bp, synthetic construct
  source 1..25: mol_type = other DNA; mol_type = other DNA
gactctgcggcgactgccagcatct

SEQ ID NO: 16195 - DNA, 25 bp, synthetic construct
  source 1..25: mol_type = other DNA; mol_type = other DNA
gactctgcggcggctaccagcatct

SEQ ID NO: 16196 - DNA, 25 bp, synthetic construct
  source 1..25: mol_type = other DNA; mol_type = other DNA
gactctgcggcggctgccaacatct

SEQ ID NO: 16197 - DNA, 25 bp, synthetic construct
  source 1..25: mol_type = other DNA; mol_type = other DNA
ggctctacagcggctgccagcatct

SEQ ID NO: 16198 - DNA, 25 bp, synthetic construct
  source 1..25: mol_type = other DNA; mol_type = other DNA
ggctctacgacggctgccagcatct

SEQ ID NO: 16199 - DNA, 25 bp, synthetic construct
  source 1..25: mol_type = other DNA; mol_type = other DNA
ggctctacggcagctgccagcatct

SEQ ID NO: 16200 - DNA, 25 bp, synthetic construct
  source 1..25: mol_type = other DNA; mol_type = other DNA
ggctctacggcgactgccagcatct

SEQ ID NO: 16201 - DNA, 25 bp, synthetic construct
  source 1..25: mol_type = other DNA; mol_type = other DNA
ggctctacggcggctaccagcatct

SEQ ID NO: 16202 - DNA, 25 bp, synthetic construct
  source 1..25: mol_type = other DNA; mol_type = other DNA
ggctctacggcggctgccaacatct

SEQ ID NO: 16203 - DNA, 25 bp, synthetic construct
  source 1..25: mol_type = other DNA; mol_type = other DNA
ggctctgcaacggctgccagcatct

SEQ ID NO: 16204 - DNA, 25 bp, synthetic construct
  source 1..25: mol_type = other DNA; mol_type = other DNA
ggctctgcagcagctgccagcatct

SEQ ID NO: 16205 - DNA, 25 bp, synthetic construct
  source 1..25: mol_type = other DNA; mol_type = other DNA
ggctctgcagcgactgccagcatct

SEQ ID NO: 16206 - DNA, 25 bp, synthetic construct
  source 1..25: mol_type = other DNA; mol_type = other DNA
ggctctgcagcggctaccagcatct

SEQ ID NO: 16207 - DNA, 25 bp, synthetic construct
  source 1..25: mol_type = other DNA; mol_type = other DNA
ggctctgcagcggctgccaacatct

SEQ ID NO: 16208 - DNA, 25 bp, synthetic construct
  source 1..25: mol_type = other DNA; mol_type = other DNA
ggctctgcgacagctgccagcatct

SEQ ID NO: 16209 - DNA, 25 bp, synthetic construct
  source 1..25: mol_type = other DNA; mol_type = other DNA
ggctctgcgacgactgccagcatct

SEQ ID NO: 16210 - DNA, 25 bp, synthetic construct
  source 1..25: mol_type = other DNA; mol_type = other DNA
ggctctgcgacggctaccagcatct

SEQ ID NO: 16211 - DNA, 25 bp, synthetic construct
  source 1..25: mol_type = other DNA; mol_type = other DNA
ggctctgcgacggctgccaacatct

SEQ ID NO: 16212 - DNA, 25 bp, synthetic construct
  source 1..25: mol_type = other DNA; mol_type = other DNA
ggctctgcggcaactgccagcatct

SEQ ID NO: 16213 - DNA, 25 bp, synthetic construct
  source 1..25: mol_type = other DNA; mol_type = other DNA
ggctctgcggcagctaccagcatct

SEQ ID NO: 16214 - DNA, 25 bp, synthetic construct
  source 1..25: mol_type = other DNA; mol_type = other DNA
ggctctgcggcagctgccaacatct

SEQ ID NO: 16215 - DNA, 25 bp, synthetic construct
  source 1..25: mol_type = other DNA; mol_type = other DNA
ggctctgcggcgactaccagcatct

SEQ ID NO: 16216 - DNA, 25 bp, synthetic construct
  source 1..25: mol_type = other DNA; mol_type = other DNA
ggctctgcggcgactgccaacatct

SEQ ID NO: 16217 - DNA, 25 bp, synthetic construct
  source 1..25: mol_type = other DNA; mol_type = other DNA
taactctgcggcggctgccagcatc

SEQ ID NO: 16218 - DNA, 25 bp, synthetic construct
  source 1..25: mol_type = other DNA; mol_type = other DNA
tagctctacggcggctgccagcatc

SEQ ID NO: 16219 - DNA, 25 bp, synthetic construct
  source 1..25: mol_type = other DNA; mol_type = other DNA
tagctctgcagcggctgccagcatc

SEQ ID NO: 16220 - DNA, 25 bp, synthetic construct
  source 1..25: mol_type = other DNA; mol_type = other DNA
tagctctgcgacggctgccagcatc

SEQ ID NO: 16221 - DNA, 25 bp, synthetic construct
  source 1..25: mol_type = other DNA; mol_type = other DNA
tagctctgcggcagctgccagcatc

SEQ ID NO: 16222 - DNA, 25 bp, synthetic construct
  source 1..25: mol_type = other DNA; mol_type = other DNA
tagctctgcggcgactgccagcatc

SEQ ID NO: 16223 - DNA, 25 bp, synthetic construct
  source 1..25: mol_type = other DNA; mol_type = other DNA
tagctctgcggcggctaccagcatc

SEQ ID NO: 16224 - DNA, 25 bp, synthetic construct
  source 1..25: mol_type = other DNA; mol_type = other DNA
tagctctgcggcggctgccaacatc

SEQ ID NO: 16225 - DNA, 25 bp, synthetic construct
  source 1..25: mol_type = other DNA; mol_type = other DNA
tgactctacggcggctgccagcatc

SEQ ID NO: 16226 - DNA, 25 bp, synthetic construct
  source 1..25: mol_type = other DNA; mol_type = other DNA
tgactctgcagcggctgccagcatc

SEQ ID NO: 16227 - DNA, 25 bp, synthetic construct
  source 1..25: mol_type = other DNA; mol_type = other DNA
tgactctgcgacggctgccagcatc

SEQ ID NO: 16228 - DNA, 25 bp, synthetic construct
  source 1..25: mol_type = other DNA; mol_type = other DNA
tgactctgcggcagctgccagcatc

SEQ ID NO: 16229 - DNA, 25 bp, synthetic construct
  source 1..25: mol_type = other DNA; mol_type = other DNA
tgactctgcggcgactgccagcatc

SEQ ID NO: 16230 - DNA, 25 bp, synthetic construct
  source 1..25: mol_type = other DNA; mol_type = other DNA
tgactctgcggcggctaccagcatc

SEQ ID NO: 16231 - DNA, 25 bp, synthetic construct
  source 1..25: mol_type = other DNA; mol_type = other DNA
tgactctgcggcggctgccaacatc

SEQ ID NO: 16232 - DNA, 25 bp, synthetic construct
  source 1..25: mol_type = other DNA; mol_type = other DNA
tggctctacagcggctgccagcatc

SEQ ID NO: 16233 - DNA, 25 bp, synthetic construct
  source 1..25: mol_type = other DNA; mol_type = other DNA
tggctctacgacggctgccagcatc

SEQ ID NO: 16234 - DNA, 25 bp, synthetic construct
  source 1..25: mol_type = other DNA; mol_type = other DNA
tggctctacggcagctgccagcatc

SEQ ID NO: 16235 - DNA, 25 bp, synthetic construct
  source 1..25: mol_type = other DNA; mol_type = other DNA
tggctctacggcgactgccagcatc

SEQ ID NO: 16236 - DNA, 25 bp, synthetic construct
  source 1..25: mol_type = other DNA; mol_type = other DNA
tggctctacggcggctaccagcatc

SEQ ID NO: 16237 - DNA, 25 bp, synthetic construct
  source 1..25: mol_type = other DNA; mol_type = other DNA
tggctctacggcggctgccaacatc

SEQ ID NO: 16238 - DNA, 25 bp, synthetic construct
  source 1..25: mol_type = other DNA; mol_type = other DNA
tggctctgcaacggctgccagcatc

SEQ ID NO: 16239 - DNA, 25 bp, synthetic construct
  source 1..25: mol_type = other DNA; mol_type = other DNA
tggctctgcagcagctgccagcatc

SEQ ID NO: 16240 - DNA, 25 bp, synthetic construct
  source 1..25: mol_type = other DNA; mol_type = other DNA
tggctctgcagcgactgccagcatc

SEQ ID NO: 16241 - DNA, 25 bp, synthetic construct
  source 1..25: mol_type = other DNA; mol_type = other DNA
tggctctgcagcggctaccagcatc

SEQ ID NO: 16242 - DNA, 25 bp, synthetic construct
  source 1..25: mol_type = other DNA; mol_type = other DNA
tggctctgcagcggctgccaacatc

SEQ ID NO: 16243 - DNA, 25 bp, synthetic construct
  source 1..25: mol_type = other DNA; mol_type = other DNA
tggctctgcgacagctgccagcatc

SEQ ID NO: 16244 - DNA, 25 bp, synthetic construct
  source 1..25: mol_type = other DNA; mol_type = other DNA
tggctctgcgacgactgccagcatc

SEQ ID NO: 16245 - DNA, 25 bp, synthetic construct
  source 1..25: mol_type = other DNA; mol_type = other DNA
tggctctgcgacggctaccagcatc

SEQ ID NO: 16246 - DNA, 25 bp, synthetic construct
  source 1..25: mol_type = other DNA; mol_type = other DNA
tggctctgcgacggctgccaacatc

SEQ ID NO: 16247 - DNA, 25 bp, synthetic construct
  source 1..25: mol_type = other DNA; mol_type = other DNA
tggctctgcggcaactgccagcatc

SEQ ID NO: 16248 - DNA, 25 bp, synthetic construct
  source 1..25: mol_type = other DNA; mol_type = other DNA
tggctctgcggcagctaccagcatc

SEQ ID NO: 16249 - DNA, 25 bp, synthetic construct
  source 1..25: mol_type = other DNA; mol_type = other DNA
tggctctgcggcagctgccaacatc

SEQ ID NO: 16250 - DNA, 25 bp, synthetic construct
  source 1..25: mol_type = other DNA; mol_type = other DNA
tggctctgcggcgactaccagcatc

SEQ ID NO: 16251 - DNA, 25 bp, synthetic construct
  source 1..25: mol_type = other DNA; mol_type = other DNA
tggctctgcggcgactgccaacatc

SEQ ID NO: 16252 - DNA, 25 bp, synthetic construct
  source 1..25: mol_type = other DNA; mol_type = other DNA
gcacagcaaggaggctccatctcag

SEQ ID NO: 16253 - DNA, 25 bp, synthetic construct
  source 1..25: mol_type = other DNA; mol_type = other DNA
gatgtctggccgcagcgttggctct

SEQ ID NO: 16254 - DNA, 25 bp, synthetic construct
  source 1..25: mol_type = other DNA; mol_type = other DNA
agggcacggcctgggcgggagtggg

SEQ ID NO: 16255 - DNA, 25 bp, synthetic construct
  source 1..25: mol_type = other DNA; mol_type = other DNA
agggcacggccgtggcgggagtggg

SEQ ID NO: 16256 - DNA, 25 bp, synthetic construct
  source 1..25: mol_type = other DNA; mol_type = other DNA
agggcacggccggtgcgggagtggg

SEQ ID NO: 16257 - DNA, 25 bp, synthetic construct
  source 1..25: mol_type = other DNA; mol_type = other DNA
agggcacggccgggtcgggagtggg

SEQ ID NO: 16258 - DNA, 25 bp, synthetic construct
  source 1..25: mol_type = other DNA; mol_type = other DNA
cagggcacggcctgggcgggagtgg

SEQ ID NO: 16259 - DNA, 25 bp, synthetic construct
  source 1..25: mol_type = other DNA; mol_type = other DNA
cagggcacggccgtggcgggagtgg

SEQ ID NO: 16260 - DNA, 25 bp, synthetic construct
  source 1..25: mol_type = other DNA; mol_type = other DNA
cagggcacggccggtgcgggagtgg

SEQ ID NO: 16261 - DNA, 25 bp, synthetic construct
  source 1..25: mol_type = other DNA; mol_type = other DNA
cagggcacggccgggtcgggagtgg

SEQ ID NO: 16262 - DNA, 25 bp, synthetic construct
  source 1..25: mol_type = other DNA; mol_type = other DNA
gcagggcacggcctgggcgggagtg

SEQ ID NO: 16263 - DNA, 25 bp, synthetic construct
  source 1..25: mol_type = other DNA; mol_type = other DNA
gcagggcacggccgtggcgggagtg

SEQ ID NO: 16264 - DNA, 25 bp, synthetic construct
  source 1..25: mol_type = other DNA; mol_type = other DNA
gcagggcacggccggtgcgggagtg

SEQ ID NO: 16265 - DNA, 25 bp, synthetic construct
  source 1..25: mol_type = other DNA; mol_type = other DNA
gcagggcacggccgggtcgggagtg

SEQ ID NO: 16266 - DNA, 25 bp, synthetic construct
  source 1..25: mol_type = other DNA; mol_type = other DNA
ggcagggcacggcctgggcgggagt

SEQ ID NO: 16267 - DNA, 25 bp, synthetic construct
  source 1..25: mol_type = other DNA; mol_type = other DNA
ggcagggcacggccgtggcgggagt

SEQ ID NO: 16268 - DNA, 25 bp, synthetic construct
  source 1..25: mol_type = other DNA; mol_type = other DNA
ggcagggcacggccggtgcgggagt

SEQ ID NO: 16269 - DNA, 25 bp, synthetic construct
  source 1..25: mol_type = other DNA; mol_type = other DNA
ggcagggcacggccgggtcgggagt

SEQ ID NO: 16270 - DNA, 25 bp, synthetic construct
  source 1..25: mol_type = other DNA; mol_type = other DNA
cggcagggcacggcctgggcgggag

SEQ ID NO: 16271 - DNA, 25 bp, synthetic construct
  source 1..25: mol_type = other DNA; mol_type = other DNA
cggcagggcacggccgtggcgggag

SEQ ID NO: 16272 - DNA, 25 bp, synthetic construct
  source 1..25: mol_type = other DNA; mol_type = other DNA
cggcagggcacggccggtgcgggag

SEQ ID NO: 16273 - DNA, 25 bp, synthetic construct
  source 1..25: mol_type = other DNA; mol_type = other DNA
cggcagggcacggccgggtcgggag

SEQ ID NO: 16274 - DNA, 25 bp, synthetic construct
  source 1..25: mol_type = other DNA; mol_type = other DNA
ccggcagggcacggcctgggcggga

SEQ ID NO: 16275 - DNA, 25 bp, synthetic construct
  source 1..25: mol_type = other DNA; mol_type = other DNA
ccggcagggcacggccgtggcggga

SEQ ID NO: 16276 - DNA, 25 bp, synthetic construct
  source 1..25: mol_type = other DNA; mol_type = other DNA
ccggcagggcacggccggtgcggga

SEQ ID NO: 16277 - DNA, 25 bp, synthetic construct
  source 1..25: mol_type = other DNA; mol_type = other DNA
ccggcagggcacggccgggtcggga

SEQ ID NO: 16278 - DNA, 25 bp, synthetic construct
  source 1..25: mol_type = other DNA; mol_type = other DNA
gccggcagggcacggcctgggcggg

SEQ ID NO: 16279 - DNA, 25 bp, synthetic construct
  source 1..25: mol_type = other DNA; mol_type = other DNA
gccggcagggcacggccgtggcggg

SEQ ID NO: 16280 - DNA, 25 bp, synthetic construct
  source 1..25: mol_type = other DNA; mol_type = other DNA
gccggcagggcacggccggtgcggg

SEQ ID NO: 16281 - DNA, 25 bp, synthetic construct
  source 1..25: mol_type = other DNA; mol_type = other DNA
gccggcagggcacggccgggtcggg

SEQ ID NO: 16282 - DNA, 25 bp, synthetic construct
  source 1..25: mol_type = other DNA; mol_type = other DNA
tgccggcagggcacggcctgggcgg

SEQ ID NO: 16283 - DNA, 25 bp, synthetic construct
  source 1..25: mol_type = other DNA; mol_type = other DNA
tgccggcagggcacggccgtggcgg

SEQ ID NO: 16284 - DNA, 25 bp, synthetic construct
  source 1..25: mol_type = other DNA; mol_type = other DNA
tgccggcagggcacggccggtgcgg

SEQ ID NO: 16285 - DNA, 25 bp, synthetic construct
  source 1..25: mol_type = other DNA; mol_type = other DNA
tgccggcagggcacggccgggtcgg

SEQ ID NO: 16286 - DNA, 25 bp, synthetic construct
  source 1..25: mol_type = other DNA; mol_type = other DNA
ctgccggcagggcacggcctgggcg

SEQ ID NO: 16287 - DNA, 25 bp, synthetic construct
  source 1..25: mol_type = other DNA; mol_type = other DNA
ctgccggcagggcacggccgtggcg

SEQ ID NO: 16288 - DNA, 25 bp, synthetic construct
  source 1..25: mol_type = other DNA; mol_type = other DNA
ctgccggcagggcacggccggtgcg

SEQ ID NO: 16289 - DNA, 25 bp, synthetic construct
  source 1..25: mol_type = other DNA; mol_type = other DNA
ctgccggcagggcacggccgggtcg

SEQ ID NO: 16290 - DNA, 25 bp, synthetic construct
  source 1..25: mol_type = other DNA; mol_type = other DNA
cggccgaggcgggagtgagggtggg

SEQ ID NO: 16291 - DNA, 25 bp, synthetic construct
  source 1..25: mol_type = other DNA; mol_type = other DNA
cggccgaggcgggagtggaggtggg

SEQ ID NO: 16292 - DNA, 25 bp, synthetic construct
  source 1..25: mol_type = other DNA; mol_type = other DNA
cggccgaggcgggagtgggagtggg

SEQ ID NO: 16293 - DNA, 25 bp, synthetic construct
  source 1..25: mol_type = other DNA; mol_type = other DNA
cggccggagcgggagtgagggtggg

SEQ ID NO: 16294 - DNA, 25 bp, synthetic construct
  source 1..25: mol_type = other DNA; mol_type = other DNA
cggccggagcgggagtggaggtggg

SEQ ID NO: 16295 - DNA, 25 bp, synthetic construct
  source 1..25: mol_type = other DNA; mol_type = other DNA
cggccggagcgggagtgggagtggg

SEQ ID NO: 16296 - DNA, 25 bp, synthetic construct
  source 1..25: mol_type = other DNA; mol_type = other DNA
acggccagggcgggagtgagggtgg

SEQ ID NO: 16297 - DNA, 25 bp, synthetic construct
  source 1..25: mol_type = other DNA; mol_type = other DNA
acggccagggcgggagtggaggtgg

SEQ ID NO: 16298 - DNA, 25 bp, synthetic construct
  source 1..25: mol_type = other DNA; mol_type = other DNA
acggccagggcgggagtgggagtgg

SEQ ID NO: 16299 - DNA, 25 bp, synthetic construct
  source 1..25: mol_type = other DNA; mol_type = other DNA
acggccgaggcgggagtgagggtgg

SEQ ID NO: 16300 - DNA, 25 bp, synthetic construct
  source 1..25: mol_type = other DNA; mol_type = other DNA
acggccgaggcgggagtggaggtgg

SEQ ID NO: 16301 - DNA, 25 bp, synthetic construct
  source 1..25: mol_type = other DNA; mol_type = other DNA
acggccgaggcgggagtgggagtgg

SEQ ID NO: 16302 - DNA, 25 bp, synthetic construct
  source 1..25: mol_type = other DNA; mol_type = other DNA
acggccgggacgggagtgagggtgg

SEQ ID NO: 16303 - DNA, 25 bp, synthetic construct
  source 1..25: mol_type = other DNA; mol_type = other DNA
acggccgggacgggagtggaggtgg

SEQ ID NO: 16304 - DNA, 25 bp, synthetic construct
  source 1..25: mol_type = other DNA; mol_type = other DNA
acggccgggacgggagtgggagtgg

SEQ ID NO: 16305 - DNA, 25 bp, synthetic construct
  source 1..25: mol_type = other DNA; mol_type = other DNA
cacggccagggcgggagtgagggtg

SEQ ID NO: 16306 - DNA, 25 bp, synthetic construct
  source 1..25: mol_type = other DNA; mol_type = other DNA
cacggccagggcgggagtggaggtg

SEQ ID NO: 16307 - DNA, 25 bp, synthetic construct
  source 1..25: mol_type = other DNA; mol_type = other DNA
cacggccagggcgggagtgggagtg

SEQ ID NO: 16308 - DNA, 25 bp, synthetic construct
  source 1..25: mol_type = other DNA; mol_type = other DNA
cacggccggagcgggagtgagggtg

SEQ ID NO: 16309 - DNA, 25 bp, synthetic construct
  source 1..25: mol_type = other DNA; mol_type = other DNA
cacggccggagcgggagtggaggtg

SEQ ID NO: 16310 - DNA, 25 bp, synthetic construct
  source 1..25: mol_type = other DNA; mol_type = other DNA
cacggccggagcgggagtgggagtg

SEQ ID NO: 16311 - DNA, 25 bp, synthetic construct
  source 1..25: mol_type = other DNA; mol_type = other DNA
cacggccgggacgggagtgagggtg

SEQ ID NO: 16312 - DNA, 25 bp, synthetic construct
  source 1..25: mol_type = other DNA; mol_type = other DNA
cacggccgggacgggagtggaggtg

SEQ ID NO: 16313 - DNA, 25 bp, synthetic construct
  source 1..25: mol_type = other DNA; mol_type = other DNA
cacggccgggacgggagtgggagtg

SEQ ID NO: 16314 - DNA, 25 bp, synthetic construct
  source 1..25: mol_type = other DNA; mol_type = other DNA
gcacggccgaggcgggagtgagggt

SEQ ID NO: 16315 - DNA, 25 bp, synthetic construct
  source 1..25: mol_type = other DNA; mol_type = other DNA
gcacggccgaggcgggagtggaggt

SEQ ID NO: 16316 - DNA, 25 bp, synthetic construct
  source 1..25: mol_type = other DNA; mol_type = other DNA
gcacggccgaggcgggagtgggagt

SEQ ID NO: 16317 - DNA, 25 bp, synthetic construct
  source 1..25: mol_type = other DNA; mol_type = other DNA
gcacggccggagcgggagtgagggt

SEQ ID NO: 16318 - DNA, 25 bp, synthetic construct
  source 1..25: mol_type = other DNA; mol_type = other DNA
gcacggccggagcgggagtggaggt

SEQ ID NO: 16319 - DNA, 25 bp, synthetic construct
  source 1..25: mol_type = other DNA; mol_type = other DNA
gcacggccggagcgggagtgggagt

SEQ ID NO: 16320 - DNA, 25 bp, synthetic construct
  source 1..25: mol_type = other DNA; mol_type = other DNA
ggcacggccgaggcgggagtgaggg

SEQ ID NO: 16321 - DNA, 25 bp, synthetic construct
  source 1..25: mol_type = other DNA; mol_type = other DNA
ggcacggccgaggcgggagtggagg

SEQ ID NO: 16322 - DNA, 25 bp, synthetic construct
  source 1..25: mol_type = other DNA; mol_type = other DNA
ggcacggccgaggcgggagtgggag

SEQ ID NO: 16323 - DNA, 25 bp, synthetic construct
  source 1..25: mol_type = other DNA; mol_type = other DNA
ggcacggccggagcgggagtgaggg

SEQ ID NO: 16324 - DNA, 25 bp, synthetic construct
  source 1..25: mol_type = other DNA; mol_type = other DNA
ggcacggccggagcgggagtggagg

SEQ ID NO: 16325 - DNA, 25 bp, synthetic construct
  source 1..25: mol_type = other DNA; mol_type = other DNA
ggcacggccggagcgggagtgggag

SEQ ID NO: 16326 - DNA, 25 bp, synthetic construct
  source 1..25: mol_type = other DNA; mol_type = other DNA
gggcacggccgaggcgggagtaggg

SEQ ID NO: 16327 - DNA, 25 bp, synthetic construct
  source 1..25: mol_type = other DNA; mol_type = other DNA
gggcacggccgaggcgggagtgagg

SEQ ID NO: 16328 - DNA, 25 bp, synthetic construct
  source 1..25: mol_type = other DNA; mol_type = other DNA
gggcacggccgaggcgggagtggag

SEQ ID NO: 16329 - DNA, 25 bp, synthetic construct
  source 1..25: mol_type = other DNA; mol_type = other DNA
gggcacggccgaggcgggagtggga

SEQ ID NO: 16330 - DNA, 25 bp, synthetic construct
  source 1..25: mol_type = other DNA; mol_type = other DNA
gggcacggccggagcgggagtaggg

SEQ ID NO: 16331 - DNA, 25 bp, synthetic construct
  source 1..25: mol_type = other DNA; mol_type = other DNA
gggcacggccggagcgggagtgagg

SEQ ID NO: 16332 - DNA, 25 bp, synthetic construct
  source 1..25: mol_type = other DNA; mol_type = other DNA
gggcacggccggagcgggagtggag

SEQ ID NO: 16333 - DNA, 25 bp, synthetic construct
  source 1..25: mol_type = other DNA; mol_type = other DNA
gggcacggccggagcgggagtggga

SEQ ID NO: 16334 - DNA, 25 bp, synthetic construct
  source 1..25: mol_type = other DNA; mol_type = other DNA
agagcacggccagggcgggagtggg

SEQ ID NO: 16335 - DNA, 25 bp, synthetic construct
  source 1..25: mol_type = other DNA; mol_type = other DNA
agagcacggccgaggcgggagtggg

SEQ ID NO: 16336 - DNA, 25 bp, synthetic construct
  source 1..25: mol_type = other DNA; mol_type = other DNA
agagcacggccggagcgggagtggg

SEQ ID NO: 16337 - DNA, 25 bp, synthetic construct
  source 1..25: mol_type = other DNA; mol_type = other DNA
agagcacggccgggacgggagtggg

SEQ ID NO: 16338 - DNA, 25 bp, synthetic construct
  source 1..25: mol_type = other DNA; mol_type = other DNA
agggcacggccgaagcgggagtggg

SEQ ID NO: 16339 - DNA, 25 bp, synthetic construct
  source 1..25: mol_type = other DNA; mol_type = other DNA
agggcacggccgagacgggagtggg

SEQ ID NO: 16340 - DNA, 25 bp, synthetic construct
  source 1..25: mol_type = other DNA; mol_type = other DNA
agggcacggccgaggcaggagtggg

SEQ ID NO: 16341 - DNA, 25 bp, synthetic construct
  source 1..25: mol_type = other DNA; mol_type = other DNA
agggcacggccgaggcgagagtggg

SEQ ID NO: 16342 - DNA, 25 bp, synthetic construct
  source 1..25: mol_type = other DNA; mol_type = other DNA
agggcacggccgaggcggaagtggg

SEQ ID NO: 16343 - DNA, 25 bp, synthetic construct
  source 1..25: mol_type = other DNA; mol_type = other DNA
agggcacggccgaggcgggaatggg

SEQ ID NO: 16344 - DNA, 25 bp, synthetic construct
  source 1..25: mol_type = other DNA; mol_type = other DNA
agggcacggccgaggcgggagtagg

SEQ ID NO: 16345 - DNA, 25 bp, synthetic construct
  source 1..25: mol_type = other DNA; mol_type = other DNA
agggcacggccgaggcgggagtgag

SEQ ID NO: 16346 - DNA, 25 bp, synthetic construct
  source 1..25: mol_type = other DNA; mol_type = other DNA
agggcacggccgaggcgggagtgga

SEQ ID NO: 16347 - DNA, 25 bp, synthetic construct
  source 1..25: mol_type = other DNA; mol_type = other DNA
cagagcacggccagggcgggagtgg

SEQ ID NO: 16348 - DNA, 25 bp, synthetic construct
  source 1..25: mol_type = other DNA; mol_type = other DNA
cagagcacggccgaggcgggagtgg

SEQ ID NO: 16349 - DNA, 25 bp, synthetic construct
  source 1..25: mol_type = other DNA; mol_type = other DNA
cagagcacggccggagcgggagtgg

SEQ ID NO: 16350 - DNA, 25 bp, synthetic construct
  source 1..25: mol_type = other DNA; mol_type = other DNA
cagagcacggccgggacgggagtgg

SEQ ID NO: 16351 - DNA, 25 bp, synthetic construct
  source 1..25: mol_type = other DNA; mol_type = other DNA
cagggcacggccgaagcgggagtgg

SEQ ID NO: 16352 - DNA, 25 bp, synthetic construct
  source 1..25: mol_type = other DNA; mol_type = other DNA
cagggcacggccgagacgggagtgg

SEQ ID NO: 16353 - DNA, 25 bp, synthetic construct
  source 1..25: mol_type = other DNA; mol_type = other DNA
cagggcacggccgaggcaggagtgg

SEQ ID NO: 16354 - DNA, 25 bp, synthetic construct
  source 1..25: mol_type = other DNA; mol_type = other DNA
cagggcacggccgaggcgagagtgg

SEQ ID NO: 16355 - DNA, 25 bp, synthetic construct
  source 1..25: mol_type = other DNA; mol_type = other DNA
cagggcacggccgaggcggaagtgg

SEQ ID NO: 16356 - DNA, 25 bp, synthetic construct
  source 1..25: mol_type = other DNA; mol_type = other DNA
cagggcacggccgaggcgggaatgg

SEQ ID NO: 16357 - DNA, 25 bp, synthetic construct
  source 1..25: mol_type = other DNA; mol_type = other DNA
cagggcacggccgaggcgggagtag

SEQ ID NO: 16358 - DNA, 25 bp, synthetic construct
  source 1..25: mol_type = other DNA; mol_type = other DNA
cagggcacggccgaggcgggagtga

SEQ ID NO: 16359 - DNA, 25 bp, synthetic construct
  source 1..25: mol_type = other DNA; mol_type = other DNA
gcaaggcacggccagggcgggagtg

SEQ ID NO: 16360 - DNA, 25 bp, synthetic construct
  source 1..25: mol_type = other DNA; mol_type = other DNA
gcaaggcacggccgaggcgggagtg

SEQ ID NO: 16361 - DNA, 25 bp, synthetic construct
  source 1..25: mol_type = other DNA; mol_type = other DNA
gcaaggcacggccggagcgggagtg

SEQ ID NO: 16362 - DNA, 25 bp, synthetic construct
  source 1..25: mol_type = other DNA; mol_type = other DNA
gcaaggcacggccgggacgggagtg

SEQ ID NO: 16363 - DNA, 25 bp, synthetic construct
  source 1..25: mol_type = other DNA; mol_type = other DNA
gcagggcacggccgaagcgggagtg

SEQ ID NO: 16364 - DNA, 25 bp, synthetic construct
  source 1..25: mol_type = other DNA; mol_type = other DNA
gcagggcacggccgagacgggagtg

SEQ ID NO: 16365 - DNA, 25 bp, synthetic construct
  source 1..25: mol_type = other DNA; mol_type = other DNA
gcagggcacggccgaggcaggagtg

SEQ ID NO: 16366 - DNA, 25 bp, synthetic construct
  source 1..25: mol_type = other DNA; mol_type = other DNA
gcagggcacggccgaggcgagagtg

SEQ ID NO: 16367 - DNA, 25 bp, synthetic construct
  source 1..25: mol_type = other DNA; mol_type = other DNA
gcagggcacggccgaggcggaagtg

SEQ ID NO: 16368 - DNA, 25 bp, synthetic construct
  source 1..25: mol_type = other DNA; mol_type = other DNA
gcagggcacggccgaggcgggaatg

SEQ ID NO: 16369 - DNA, 25 bp, synthetic construct
  source 1..25: mol_type = other DNA; mol_type = other DNA
gcagggcacggccgaggcgggagta

SEQ ID NO: 16370 - DNA, 25 bp, synthetic construct
  source 1..25: mol_type = other DNA; mol_type = other DNA
gacagggcacggccagggcgggagt

SEQ ID NO: 16371 - DNA, 25 bp, synthetic construct
  source 1..25: mol_type = other DNA; mol_type = other DNA
gacagggcacggccgaggcgggagt

SEQ ID NO: 16372 - DNA, 25 bp, synthetic construct
  source 1..25: mol_type = other DNA; mol_type = other DNA
gacagggcacggccggagcgggagt

SEQ ID NO: 16373 - DNA, 25 bp, synthetic construct
  source 1..25: mol_type = other DNA; mol_type = other DNA
gacagggcacggccgggacgggagt

SEQ ID NO: 16374 - DNA, 25 bp, synthetic construct
  source 1..25: mol_type = other DNA; mol_type = other DNA
ggcagggcacggccgaagcgggagt

SEQ ID NO: 16375 - DNA, 25 bp, synthetic construct
  source 1..25: mol_type = other DNA; mol_type = other DNA
ggcagggcacggccgagacgggagt

SEQ ID NO: 16376 - DNA, 25 bp, synthetic construct
  source 1..25: mol_type = other DNA; mol_type = other DNA
ggcagggcacggccgaggcaggagt

SEQ ID NO: 16377 - DNA, 25 bp, synthetic construct
  source 1..25: mol_type = other DNA; mol_type = other DNA
ggcagggcacggccgaggcgagagt

SEQ ID NO: 16378 - DNA, 25 bp, synthetic construct
  source 1..25: mol_type = other DNA; mol_type = other DNA
ggcagggcacggccgaggcggaagt

SEQ ID NO: 16379 - DNA, 25 bp, synthetic construct
  source 1..25: mol_type = other DNA; mol_type = other DNA
ggcagggcacggccgaggcgggaat

SEQ ID NO: 16380 - DNA, 25 bp, synthetic construct
  source 1..25: mol_type = other DNA; mol_type = other DNA
cgacagggcacggccagggcgggag

SEQ ID NO: 16381 - DNA, 25 bp, synthetic construct
  source 1..25: mol_type = other DNA; mol_type = other DNA
cgacagggcacggccgaggcgggag

SEQ ID NO: 16382 - DNA, 25 bp, synthetic construct
  source 1..25: mol_type = other DNA; mol_type = other DNA
cgacagggcacggccggagcgggag

SEQ ID NO: 16383 - DNA, 25 bp, synthetic construct
  source 1..25: mol_type = other DNA; mol_type = other DNA
cgacagggcacggccgggacgggag

SEQ ID NO: 16384 - DNA, 25 bp, synthetic construct
  source 1..25: mol_type = other DNA; mol_type = other DNA
cggcagggcacggccaaggcgggag

SEQ ID NO: 16385 - DNA, 25 bp, synthetic construct
  source 1..25: mol_type = other DNA; mol_type = other DNA
cggcagggcacggccagagcgggag

SEQ ID NO: 16386 - DNA, 25 bp, synthetic construct
  source 1..25: mol_type = other DNA; mol_type = other DNA
cggcagggcacggccaggacgggag

SEQ ID NO: 16387 - DNA, 25 bp, synthetic construct
  source 1..25: mol_type = other DNA; mol_type = other DNA
cggcagggcacggccagggcaggag

SEQ ID NO: 16388 - DNA, 25 bp, synthetic construct
  source 1..25: mol_type = other DNA; mol_type = other DNA
cggcagggcacggccagggcgagag

SEQ ID NO: 16389 - DNA, 25 bp, synthetic construct
  source 1..25: mol_type = other DNA; mol_type = other DNA
cggcagggcacggccagggcggaag

SEQ ID NO: 16390 - DNA, 25 bp, synthetic construct
  source 1..25: mol_type = other DNA; mol_type = other DNA
cggcagggcacggccagggcgggaa

SEQ ID NO: 16391 - DNA, 25 bp, synthetic construct
  source 1..25: mol_type = other DNA; mol_type = other DNA
ccgacagggcacggccagggcggga

SEQ ID NO: 16392 - DNA, 25 bp, synthetic construct
  source 1..25: mol_type = other DNA; mol_type = other DNA
ccgacagggcacggccgaggcggga

SEQ ID NO: 16393 - DNA, 25 bp, synthetic construct
  source 1..25: mol_type = other DNA; mol_type = other DNA
ccgacagggcacggccggagcggga

SEQ ID NO: 16394 - DNA, 25 bp, synthetic construct
  source 1..25: mol_type = other DNA; mol_type = other DNA
ccgacagggcacggccgggacggga

SEQ ID NO: 16395 - DNA, 25 bp, synthetic construct
  source 1..25: mol_type = other DNA; mol_type = other DNA
ccggcagggcacggccaaggcggga

SEQ ID NO: 16396 - DNA, 25 bp, synthetic construct
  source 1..25: mol_type = other DNA; mol_type = other DNA
ccggcagggcacggccagagcggga

SEQ ID NO: 16397 - DNA, 25 bp, synthetic construct
  source 1..25: mol_type = other DNA; mol_type = other DNA
ccggcagggcacggccaggacggga

SEQ ID NO: 16398 - DNA, 25 bp, synthetic construct
  source 1..25: mol_type = other DNA; mol_type = other DNA
ccggcagggcacggccagggcagga

SEQ ID NO: 16399 - DNA, 25 bp, synthetic construct
  source 1..25: mol_type = other DNA; mol_type = other DNA
ccggcagggcacggccagggcgaga

SEQ ID NO: 16400 - DNA, 25 bp, synthetic construct
  source 1..25: mol_type = other DNA; mol_type = other DNA
ccggcagggcacggccagggcggaa

SEQ ID NO: 16401 - DNA, 25 bp, synthetic construct
  source 1..25: mol_type = other DNA; mol_type = other DNA
gccagcagggcacggccagggcggg

SEQ ID NO: 16402 - DNA, 25 bp, synthetic construct
  source 1..25: mol_type = other DNA; mol_type = other DNA
gccagcagggcacggccgaggcggg

SEQ ID NO: 16403 - DNA, 25 bp, synthetic construct
  source 1..25: mol_type = other DNA; mol_type = other DNA
gccagcagggcacggccggagcggg

SEQ ID NO: 16404 - DNA, 25 bp, synthetic construct
  source 1..25: mol_type = other DNA; mol_type = other DNA
gccagcagggcacggccgggacggg

SEQ ID NO: 16405 - DNA, 25 bp, synthetic construct
  source 1..25: mol_type = other DNA; mol_type = other DNA
gccggcagggcacggccaaggcggg

SEQ ID NO: 16406 - DNA, 25 bp, synthetic construct
  source 1..25: mol_type = other DNA; mol_type = other DNA
gccggcagggcacggccagagcggg

SEQ ID NO: 16407 - DNA, 25 bp, synthetic construct
  source 1..25: mol_type = other DNA; mol_type = other DNA
gccggcagggcacggccaggacggg

SEQ ID NO: 16408 - DNA, 25 bp, synthetic construct
  source 1..25: mol_type = other DNA; mol_type = other DNA
gccggcagggcacggccagggcagg

SEQ ID NO: 16409 - DNA, 25 bp, synthetic construct
  source 1..25: mol_type = other DNA; mol_type = other DNA
gccggcagggcacggccagggcgag

SEQ ID NO: 16410 - DNA, 25 bp, synthetic construct
  source 1..25: mol_type = other DNA; mol_type = other DNA
gccggcagggcacggccagggcgga

SEQ ID NO: 16411 - DNA, 25 bp, synthetic construct
  source 1..25: mol_type = other DNA; mol_type = other DNA
tgccagcagggcacggccagggcgg

SEQ ID NO: 16412 - DNA, 25 bp, synthetic construct
  source 1..25: mol_type = other DNA; mol_type = other DNA
tgccagcagggcacggccgaggcgg

SEQ ID NO: 16413 - DNA, 25 bp, synthetic construct
  source 1..25: mol_type = other DNA; mol_type = other DNA
tgccagcagggcacggccggagcgg

SEQ ID NO: 16414 - DNA, 25 bp, synthetic construct
  source 1..25: mol_type = other DNA; mol_type = other DNA
tgccagcagggcacggccgggacgg

SEQ ID NO: 16415 - DNA, 25 bp, synthetic construct
  source 1..25: mol_type = other DNA; mol_type = other DNA
tgccggcagggcacggccaaggcgg

SEQ ID NO: 16416 - DNA, 25 bp, synthetic construct
  source 1..25: mol_type = other DNA; mol_type = other DNA
tgccggcagggcacggccagagcgg

SEQ ID NO: 16417 - DNA, 25 bp, synthetic construct
  source 1..25: mol_type = other DNA; mol_type = other DNA
tgccggcagggcacggccaggacgg

SEQ ID NO: 16418 - DNA, 25 bp, synthetic construct
  source 1..25: mol_type = other DNA; mol_type = other DNA
tgccggcagggcacggccagggcag

SEQ ID NO: 16419 - DNA, 25 bp, synthetic construct
  source 1..25: mol_type = other DNA; mol_type = other DNA
tgccggcagggcacggccagggcga

SEQ ID NO: 16420 - DNA, 25 bp, synthetic construct
  source 1..25: mol_type = other DNA; mol_type = other DNA
ctgccagcagggcacggccagggcg

SEQ ID NO: 16421 - DNA, 25 bp, synthetic construct
  source 1..25: mol_type = other DNA; mol_type = other DNA
ctgccagcagggcacggccgaggcg

SEQ ID NO: 16422 - DNA, 25 bp, synthetic construct
  source 1..25: mol_type = other DNA
ctgccagcagggcacggccggagcg

SEQ ID NO: 16423 - DNA, 25 bp, synthetic construct
  source 1..25: mol_type = other DNA
ctgccagcagggcacggccgggacg

SEQ ID NO: 16424 - DNA, 25 bp, synthetic construct
  source 1..25: mol_type = other DNA; mol_type = other DNA
ctgccggcagagcacggccagggcg

SEQ ID NO: 16425 - DNA, 25 bp, synthetic construct
  source 1..25: mol_type = other DNA; mol_type = other DNA
ctgccggcagagcacggccgaggcg

SEQ ID NO: 16426 - DNA, 25 bp, synthetic construct
  source 1..25: mol_type = other DNA; mol_type = other DNA
ctgccggcagagcacggccggagcg

SEQ ID NO: 16427 - DNA, 25 bp, synthetic construct
  source 1..25: mol_type = other DNA; mol_type = other DNA
ctgccggcagagcacggccgggacg

SEQ ID NO: 16428 - DNA, 25 bp, synthetic construct
  source 1..25: mol_type = other DNA; mol_type = other DNA
ctgccggcagggcacggccgggaca

SEQ ID NO: 16429 - DNA, 25 bp, synthetic construct
  source 1..25: mol_type = other DNA; mol_type = other DNA
cctgccggcagggcacggccgggac

SEQ ID NO: 16430 - DNA, 25 bp, synthetic construct
  source 1..25: mol_type = other DNA; mol_type = other DNA
cctgccggcagggcacggccggaac

SEQ ID NO: 16431 - DNA, 25 bp, synthetic construct
  source 1..25: mol_type = other DNA; mol_type = other DNA
ccctgccggcagggcacggccggga

SEQ ID NO: 16432 - DNA, 25 bp, synthetic construct
  source 1..25: mol_type = other DNA; mol_type = other DNA
ccctgccggcagggcacggccggaa

SEQ ID NO: 16433 - DNA, 25 bp, synthetic construct
  source 1..25: mol_type = other DNA; mol_type = other DNA
gccctgccggcagggcacggccggg

SEQ ID NO: 16434 - DNA, 25 bp, synthetic construct
  source 1..25: mol_type = other DNA; mol_type = other DNA
gccctgccggcagggcacggccgga

SEQ ID NO: 16435 - DNA, 25 bp, synthetic construct
  source 1..25: mol_type = other DNA; mol_type = other DNA
gccctgccggcagggcacggccgaa

SEQ ID NO: 16436 - DNA, 25 bp, synthetic construct
  source 1..25: mol_type = other DNA; mol_type = other DNA
ggccctgccggcagggcacggccga

SEQ ID NO: 16437 - DNA, 25 bp, synthetic construct
  source 1..25: mol_type = other DNA; mol_type = other DNA
ggccctgccggcagggcacggccaa

SEQ ID NO: 16438 - DNA, 25 bp, synthetic construct
  source 1..25: mol_type = other DNA; mol_type = other DNA
gggccctgccggcagggcacggccg

SEQ ID NO: 16439 - DNA, 25 bp, synthetic construct
  source 1..25: mol_type = other DNA; mol_type = other DNA
gggccctgccggcagggcacggcca

SEQ ID NO: 16440 - DNA, 25 bp, synthetic construct
  source 1..25: mol_type = other DNA; mol_type = other DNA
gggccctgccggcagggcacgacca

SEQ ID NO: 16441 - DNA, 25 bp, synthetic construct
  source 1..25: mol_type = other DNA; mol_type = other DNA
tgggccctgccggcagggcacggcc

SEQ ID NO: 16442 - DNA, 25 bp, synthetic construct
  source 1..25: mol_type = other DNA; mol_type = other DNA
gtggccctgccggcagggcacggcc

SEQ ID NO: 16443 - DNA, 25 bp, synthetic construct
  source 1..25: mol_type = other DNA; mol_type = other DNA
ggtgccctgccggcagggcacggcc

SEQ ID NO: 16444 - DNA, 25 bp, synthetic construct
  source 1..25: mol_type = other DNA; mol_type = other DNA
gggtccctgccggcagggcacggcc

SEQ ID NO: 16445 - DNA, 25 bp, synthetic construct
  source 1..25: mol_type = other DNA; mol_type = other DNA
gtgggccctgccggcagggcacggc

SEQ ID NO: 16446 - DNA, 25 bp, synthetic construct
  source 1..25: mol_type = other DNA; mol_type = other DNA
ggtggccctgccggcagggcacggc

SEQ ID NO: 16447 - DNA, 25 bp, synthetic construct
  source 1..25: mol_type = other DNA; mol_type = other DNA
gggtgccctgccggcagggcacggc

SEQ ID NO: 16448 - DNA, 25 bp, synthetic construct
  source 1..25: mol_type = other DNA; mol_type = other DNA
ggtgggccctgccggcagggcacgg

SEQ ID NO: 16449 - DNA, 25 bp, synthetic construct
  source 1..25: mol_type = other DNA; mol_type = other DNA
gggtggccctgccggcagggcacgg

SEQ ID NO: 16450 - DNA, 25 bp, synthetic construct
  source 1..25: mol_type = other DNA; mol_type = other DNA
tggagggccctgccggcagggcacg

SEQ ID NO: 16451 - DNA, 25 bp, synthetic construct
  source 1..25: mol_type = other DNA; mol_type = other DNA
tgggaggccctgccggcagggcacg

SEQ ID NO: 16452 - DNA, 25 bp, synthetic construct
  source 1..25: mol_type = other DNA; mol_type = other DNA
gtggagggccctgccggcagggcac

SEQ ID NO: 16453 - DNA, 25 bp, synthetic construct
  source 1..25: mol_type = other DNA; mol_type = other DNA
gtgggaggccctgccggcagggcac

SEQ ID NO: 16454 - DNA, 25 bp, synthetic construct
  source 1..25: mol_type = other DNA; mol_type = other DNA
ggtggagggccctgccggcagggca

SEQ ID NO: 16455 - DNA, 25 bp, synthetic construct
  source 1..25: mol_type = other DNA; mol_type = other DNA
ggtgggaggccctgccggcagggca

SEQ ID NO: 16456 - DNA, 25 bp, synthetic construct
  source 1..25: mol_type = other DNA; mol_type = other DNA
gggtggagggccctgccggcagggc

SEQ ID NO: 16457 - DNA, 25 bp, synthetic construct
  source 1..25: mol_type = other DNA; mol_type = other DNA
gggtgggaggccctgccggcagggc

SEQ ID NO: 16458 - DNA, 25 bp, synthetic construct
  source 1..25: mol_type = other DNA; mol_type = other DNA
gagaccctgccggcagggcacggcc

SEQ ID NO: 16459 - DNA, 25 bp, synthetic construct
  source 1..25: mol_type = other DNA; mol_type = other DNA
gaggccctaccggcagggcacggcc

SEQ ID NO: 16460 - DNA, 25 bp, synthetic construct
  source 1..25: mol_type = other DNA; mol_type = other DNA
gaggccctgccagcagggcacggcc

SEQ ID NO: 16461 - DNA, 25 bp, synthetic construct
  source 1..25: mol_type = other DNA; mol_type = other DNA
gaggccctgccgacagggcacggcc

SEQ ID NO: 16462 - DNA, 25 bp, synthetic construct
  source 1..25: mol_type = other DNA; mol_type = other DNA
gaggccctgccggcagggcacagcc

SEQ ID NO: 16463 - DNA, 25 bp, synthetic construct
  source 1..25: mol_type = other DNA; mol_type = other DNA
gaggccctgccggcagggcacgacc

SEQ ID NO: 16464 - DNA, 25 bp, synthetic construct
  source 1..25: mol_type = other DNA; mol_type = other DNA
ggaaccctgccggcagggcacggcc

SEQ ID NO: 16465 - DNA, 25 bp, synthetic construct
  source 1..25: mol_type = other DNA; mol_type = other DNA
ggagccctaccggcagggcacggcc

SEQ ID NO: 16466 - DNA, 25 bp, synthetic construct
  source 1..25: mol_type = other DNA; mol_type = other DNA
gagagccctgccggcagggcacggc

SEQ ID NO: 16467 - DNA, 25 bp, synthetic construct
  source 1..25: mol_type = other DNA; mol_type = other DNA
gaggaccctgccggcagggcacggc

SEQ ID NO: 16468 - DNA, 25 bp, synthetic construct
  source 1..25: mol_type = other DNA; mol_type = other DNA
gagggccctaccggcagggcacggc

SEQ ID NO: 16469 - DNA, 25 bp, synthetic construct
  source 1..25: mol_type = other DNA; mol_type = other DNA
gagggccctgccagcagggcacggc

SEQ ID NO: 16470 - DNA, 25 bp, synthetic construct
  source 1..25: mol_type = other DNA; mol_type = other DNA
gagggccctgccggcagggcacagc

SEQ ID NO: 16471 - DNA, 25 bp, synthetic construct
  source 1..25: mol_type = other DNA; mol_type = other DNA
gagggccctgccggcagggcacgac

SEQ ID NO: 16472 - DNA, 25 bp, synthetic construct
  source 1..25: mol_type = other DNA; mol_type = other DNA
ggaagccctgccggcagggcacggc

SEQ ID NO: 16473 - DNA, 25 bp, synthetic construct
  source 1..25: mol_type = other DNA; mol_type = other DNA
ggagaccctgccggcagggcacggc

SEQ ID NO: 16474 - DNA, 25 bp, synthetic construct
  source 1..25: mol_type = other DNA; mol_type = other DNA
ggagagccctgccggcagggcacgg

SEQ ID NO: 16475 - DNA, 25 bp, synthetic construct
  source 1..25: mol_type = other DNA; mol_type = other DNA
ggaggaccctgccggcagggcacgg

SEQ ID NO: 16476 - DNA, 25 bp, synthetic construct
  source 1..25: mol_type = other DNA; mol_type = other DNA
ggagggccctaccggcagggcacgg

SEQ ID NO: 16477 - DNA, 25 bp, synthetic construct
  source 1..25: mol_type = other DNA; mol_type = other DNA
ggagggccctgccagcagggcacgg

SEQ ID NO: 16478 - DNA, 25 bp, synthetic construct
  source 1..25: mol_type = other DNA; mol_type = other DNA
ggagggccctgccggcagggcacag

SEQ ID NO: 16479 - DNA, 25 bp, synthetic construct
  source 1..25: mol_type = other DNA; mol_type = other DNA
ggagggccctgccggcagggcacga

SEQ ID NO: 16480 - DNA, 25 bp, synthetic construct
  source 1..25: mol_type = other DNA; mol_type = other DNA
gggaagccctgccggcagggcacgg

SEQ ID NO: 16481 - DNA, 25 bp, synthetic construct
  source 1..25: mol_type = other DNA; mol_type = other DNA
gggagaccctgccggcagggcacgg

SEQ ID NO: 16482 - DNA, 25 bp, synthetic construct
  source 1..25: mol_type = other DNA; mol_type = other DNA
tggaaggccctgccggcagggcacg

SEQ ID NO: 16483 - DNA, 25 bp, synthetic construct
  source 1..25: mol_type = other DNA; mol_type = other DNA
tggagagccctgccggcagggcacg

SEQ ID NO: 16484 - DNA, 25 bp, synthetic construct
  source 1..25: mol_type = other DNA; mol_type = other DNA
tggaggaccctgccggcagggcacg

SEQ ID NO: 16485 - DNA, 25 bp, synthetic construct
  source 1..25: mol_type = other DNA; mol_type = other DNA
tggagggccctaccggcagggcacg

SEQ ID NO: 16486 - DNA, 25 bp, synthetic construct
  source 1..25: mol_type = other DNA; mol_type = other DNA
tggagggccctgccggcaggacacg

SEQ ID NO: 16487 - DNA, 25 bp, synthetic construct
  source 1..25: mol_type = other DNA; mol_type = other DNA
tggagggccctgccggcagggcaca

SEQ ID NO: 16488 - DNA, 25 bp, synthetic construct
  source 1..25: mol_type = other DNA; mol_type = other DNA
tgggaagccctgccggcagggcacg

SEQ ID NO: 16489 - DNA, 25 bp, synthetic construct
  source 1..25: mol_type = other DNA; mol_type = other DNA
tgggagaccctgccggcagggcacg

SEQ ID NO: 16490 - DNA, 25 bp, synthetic construct
  source 1..25: mol_type = other DNA; mol_type = other DNA
gtggagagccctgccggcagggcac

SEQ ID NO: 16491 - DNA, 25 bp, synthetic construct
  source 1..25: mol_type = other DNA; mol_type = other DNA
gtggaggaccctgccggcagggcac

SEQ ID NO: 16492 - DNA, 25 bp, synthetic construct
  source 1..25: mol_type = other DNA; mol_type = other DNA
gtggagggccctaccggcagggcac

SEQ ID NO: 16493 - DNA, 25 bp, synthetic construct
  source 1..25: mol_type = other DNA; mol_type = other DNA
gtggagggccctgccagcagggcac

SEQ ID NO: 16494 - DNA, 25 bp, synthetic construct
  source 1..25: mol_type = other DNA; mol_type = other DNA
gtggagggccctgccggcagagcac

SEQ ID NO: 16495 - DNA, 25 bp, synthetic construct
  source 1..25: mol_type = other DNA; mol_type = other DNA
gtggagggccctgccggcaggacac

SEQ ID NO: 16496 - DNA, 25 bp, synthetic construct
  source 1..25: mol_type = other DNA; mol_type = other DNA
gtgggaagccctgccggcagggcac

SEQ ID NO: 16497 - DNA, 25 bp, synthetic construct
  source 1..25: mol_type = other DNA; mol_type = other DNA
gtgggagaccctgccggcagggcac

SEQ ID NO: 16498 - DNA, 25 bp, synthetic construct
  source 1..25: mol_type = other DNA; mol_type = other DNA
gatgggaggccctgccggcagggca

SEQ ID NO: 16499 - DNA, 25 bp, synthetic construct
  source 1..25: mol_type = other DNA; mol_type = other DNA
ggtagagggccctgccggcagggca

SEQ ID NO: 16500 - DNA, 25 bp, synthetic construct
  source 1..25: mol_type = other DNA; mol_type = other DNA
ggtggagggccctgccggcagagca

SEQ ID NO: 16501 - DNA, 25 bp, synthetic construct
  source 1..25: mol_type = other DNA; mol_type = other DNA
ggtggagggccctgccggcaggaca

SEQ ID NO: 16502 - DNA, 25 bp, synthetic construct
  source 1..25: mol_type = other DNA; mol_type = other DNA
ggatgggaggccctgccggcagggc

SEQ ID NO: 16503 - DNA, 25 bp, synthetic construct
  source 1..25: mol_type = other DNA; mol_type = other DNA
gggtagagggccctgccggcagggc

SEQ ID NO: 16504 - DNA, 25 bp, synthetic construct
  source 1..25: mol_type = other DNA; mol_type = other DNA
gggtggagggccctaccggcagggc

SEQ ID NO: 16505 - DNA, 25 bp, synthetic construct
  source 1..25: mol_type = other DNA; mol_type = other DNA
gggtggagggccctgccagcagggc

SEQ ID NO: 16506 - DNA, 25 bp, synthetic construct
  source 1..25: mol_type = other DNA; mol_type = other DNA
gggtggagggccctgccggcagagc

SEQ ID NO: 16507 - DNA, 25 bp, synthetic construct
  source 1..25: mol_type = other DNA; mol_type = other DNA
gggtggagggccctgccggcaggac

SEQ ID NO: 16508 - DNA, 25 bp, synthetic construct
  source 1..25: mol_type = other DNA; mol_type = other DNA
agggtggagggccctgccggcaggg

SEQ ID NO: 16509 - DNA, 25 bp, synthetic construct
  source 1..25: mol_type = other DNA; mol_type = other DNA
agggtgggaggccctgccggcaggg

SEQ ID NO: 16510 - DNA, 25 bp, synthetic construct
  source 1..25: mol_type = other DNA; mol_type = other DNA
gaggtggagggccctgccggcaggg

SEQ ID NO: 16511 - DNA, 25 bp, synthetic construct
  source 1..25: mol_type = other DNA; mol_type = other DNA
gaggtgggaggccctgccggcaggg

SEQ ID NO: 16512 - DNA, 25 bp, synthetic construct
  source 1..25: mol_type = other DNA; mol_type = other DNA
ggagtggagggccctgccggcaggg

SEQ ID NO: 16513 - DNA, 25 bp, synthetic construct
  source 1..25: mol_type = other DNA; mol_type = other DNA
ggagtgggaggccctgccggcaggg

SEQ ID NO: 16514 - DNA, 25 bp, synthetic construct
  source 1..25: mol_type = other DNA; mol_type = other DNA
gggatggagggccctgccggcaggg

SEQ ID NO: 16515 - DNA, 25 bp, synthetic construct
  source 1..25: mol_type = other DNA; mol_type = other DNA
gggatgggaggccctgccggcaggg

SEQ ID NO: 16516 - DNA, 25 bp, synthetic construct
  source 1..25: mol_type = other DNA; mol_type = other DNA
gagggtggagggccctgccggcagg

SEQ ID NO: 16517 - DNA, 25 bp, synthetic construct
  source 1..25: mol_type = other DNA; mol_type = other DNA
gagggtgggaggccctgccggcagg

SEQ ID NO: 16518 - DNA, 25 bp, synthetic construct
  source 1..25: mol_type = other DNA; mol_type = other DNA
ggaggtggagggccctgccggcagg

SEQ ID NO: 16519 - DNA, 25 bp, synthetic construct
  source 1..25: mol_type = other DNA; mol_type = other DNA
ggaggtgggaggccctgccggcagg

SEQ ID NO: 16520 - DNA, 25 bp, synthetic construct
  source 1..25: mol_type = other DNA; mol_type = other DNA
gggagtggagggccctgccggcagg

SEQ ID NO: 16521 - DNA, 25 bp, synthetic construct
  source 1..25: mol_type = other DNA; mol_type = other DNA
cccccatcgagaatcccaatgtctc

SEQ ID NO: 16522 - DNA, 25 bp, synthetic construct
  source 1..25: mol_type = other DNA; mol_type = other DNA
cccccatcgagaatcccaatatctc

SEQ ID NO: 16523 - DNA, 25 bp, synthetic construct
  source 1..25: mol_type = other DNA; mol_type = other DNA
cccccatcgaaaatcccaatatctc

SEQ ID NO: 16524 - DNA, 25 bp, synthetic construct
  source 1..25: mol_type = other DNA; mol_type = other DNA
gcccccatcgagaatcccaatatct

SEQ ID NO: 16525 - DNA, 25 bp, synthetic construct
  source 1..25: mol_type = other DNA; mol_type = other DNA
gcccccatcgaaaatcccaatatct

SEQ ID NO: 16526 - DNA, 25 bp, synthetic construct
  source 1..25: mol_type = other DNA; mol_type = other DNA
ggcccccatcgagaatcccaatgtc

SEQ ID NO: 16527 - DNA, 25 bp, synthetic construct
  source 1..25: mol_type = other DNA; mol_type = other DNA
ggcccccatcgagaatcccaatatc

SEQ ID NO: 16528 - DNA, 25 bp, synthetic construct
  source 1..25: mol_type = other DNA; mol_type = other DNA
ggcccccatcgaaaatcccaatatc

SEQ ID NO: 16529 - DNA, 25 bp, synthetic construct
  source 1..25: mol_type = other DNA; mol_type = other DNA
tggcccccatcgagaatcccaatgt

SEQ ID NO: 16530 - DNA, 25 bp, synthetic construct
  source 1..25: mol_type = other DNA; mol_type = other DNA
tggcccccatcgagaatcccaatat

SEQ ID NO: 16531 - DNA, 25 bp, synthetic construct
  source 1..25: mol_type = other DNA; mol_type = other DNA
tggcccccatcgaaaatcccaatat

SEQ ID NO: 16532 - DNA, 25 bp, synthetic construct
  source 1..25: mol_type = other DNA; mol_type = other DNA
ttggcccccatcgagaatcccaata

SEQ ID NO: 16533 - DNA, 25 bp, synthetic construct
  source 1..25: mol_type = other DNA; mol_type = other DNA
ttggcccccatcgaaaatcccaata

SEQ ID NO: 16534 - DNA, 25 bp, synthetic construct
  source 1..25: mol_type = other DNA; mol_type = other DNA
cttggcccccatcgagaatcccaat

SEQ ID NO: 16535 - DNA, 25 bp, synthetic construct
  source 1..25: mol_type = other DNA; mol_type = other DNA
cttggcccccatcgaaaatcccaat

SEQ ID NO: 16536 - DNA, 25 bp, synthetic construct
  source 1..25: mol_type = other DNA; mol_type = other DNA
cttggcccccatcaaaaatcccaat

SEQ ID NO: 16537 - DNA, 25 bp, synthetic construct
  source 1..25: mol_type = other DNA; mol_type = other DNA
ccttggcccccatcgagaatcccaa

SEQ ID NO: 16538 - DNA, 25 bp, synthetic construct
  source 1..25: mol_type = other DNA; mol_type = other DNA
ccttggcccccatcgaaaatcccaa

SEQ ID NO: 16539 - DNA, 25 bp, synthetic construct
  source 1..25: mol_type = other DNA; mol_type = other DNA
ccttggcccccatcaaaaatcccaa

SEQ ID NO: 16540 - DNA, 25 bp, synthetic construct
  source 1..25: mol_type = other DNA; mol_type = other DNA
tccttggcccccatcgaaaatccca

SEQ ID NO: 16541 - DNA, 25 bp, synthetic construct
  source 1..25: mol_type = other DNA; mol_type = other DNA
tccttggcccccatcaaaaatccca

SEQ ID NO: 16542 - DNA, 25 bp, synthetic construct
  source 1..25: mol_type = other DNA; mol_type = other DNA
ctccttggcccccatcgagaatccc

SEQ ID NO: 16543 - DNA, 25 bp, synthetic construct
  source 1..25: mol_type = other DNA; mol_type = other DNA
ctccttggcccccatcgaaaatccc

SEQ ID NO: 16544 - DNA, 25 bp, synthetic construct
  source 1..25: mol_type = other DNA; mol_type = other DNA
ctccttggcccccatcaaaaatccc

SEQ ID NO: 16545 - DNA, 25 bp, synthetic construct
  source 1..25: mol_type = other DNA; mol_type = other DNA
gctccttggcccccatcgagaatcc

SEQ ID NO: 16546 - DNA, 25 bp, synthetic construct
  source 1..25: mol_type = other DNA; mol_type = other DNA
gctccttggcccccatcgaaaatcc

SEQ ID NO: 16547 - DNA, 25 bp, synthetic construct
  source 1..25: mol_type = other DNA; mol_type = other DNA
gctccttggcccccatcaaaaatcc

SEQ ID NO: 16548 - DNA, 25 bp, synthetic construct
  source 1..25: mol_type = other DNA; mol_type = other DNA
ggctccttggcccccatcgaaaatc

SEQ ID NO: 16549 - DNA, 25 bp, synthetic construct
  source 1..25: mol_type = other DNA; mol_type = other DNA
ggctccttggcccccatcaaaaatc

SEQ ID NO: 16550 - DNA, 25 bp, synthetic construct
  source 1..25: mol_type = other DNA; mol_type = other DNA
gggctccttggcccccatcgagaat

SEQ ID NO: 16551 - DNA, 25 bp, synthetic construct
  source 1..25: mol_type = other DNA; mol_type = other DNA
gggctccttggcccccatcgaaaat

SEQ ID NO: 16552 - DNA, 25 bp, synthetic construct
  source 1..25: mol_type = other DNA; mol_type = other DNA
gggctccttggcccccatcaaaaat

SEQ ID NO: 16553 - DNA, 25 bp, synthetic construct
  source 1..25: mol_type = other DNA; mol_type = other DNA
agggctccttggcccccatcgagaa

SEQ ID NO: 16554 - DNA, 25 bp, synthetic construct
  source 1..25: mol_type = other DNA; mol_type = other DNA
gaggctccttggcccccatcgagaa

SEQ ID NO: 16555 - DNA, 25 bp, synthetic construct
  source 1..25: mol_type = other DNA; mol_type = other DNA
ggagctccttggcccccatcgagaa

SEQ ID NO: 16556 - DNA, 25 bp, synthetic construct
  source 1..25: mol_type = other DNA; mol_type = other DNA
gggactccttggcccccatcgagaa

SEQ ID NO: 16557 - DNA, 25 bp, synthetic construct
  source 1..25: mol_type = other DNA; mol_type = other DNA
gagggctccttggcccccatcgaga

SEQ ID NO: 16558 - DNA, 25 bp, synthetic construct
  source 1..25: mol_type = other DNA; mol_type = other DNA
ggaggctccttggcccccatcgaga

SEQ ID NO: 16559 - DNA, 25 bp, synthetic construct
  source 1..25: mol_type = other DNA; mol_type = other DNA
gggagctccttggcccccatcgaga

SEQ ID NO: 16560 - DNA, 25 bp, synthetic construct
  source 1..25: mol_type = other DNA; mol_type = other DNA
ggagggctccttggcccccatcgag

SEQ ID NO: 16561 - DNA, 25 bp, synthetic construct
  source 1..25: mol_type = other DNA; mol_type = other DNA
gggaggctccttggcccccatcgag

SEQ ID NO: 16562 - DNA, 25 bp, synthetic construct
  source 1..25: mol_type = other DNA; mol_type = other DNA
aggagggctccttggcccccatcga

SEQ ID NO: 16563 - DNA, 25 bp, synthetic construct
  source 1..25: mol_type = other DNA; mol_type = other DNA
agggaggctccttggcccccatcga

SEQ ID NO: 16564 - DNA, 25 bp, synthetic construct
  source 1..25: mol_type = other DNA; mol_type = other DNA
caggagggctccttggcccccatcg

SEQ ID NO: 16565 - DNA, 25 bp, synthetic construct
  source 1..25: mol_type = other DNA; mol_type = other DNA
cagggaggctccttggcccccatcg

SEQ ID NO: 16566 - DNA, 25 bp, synthetic construct
  source 1..25: mol_type = other DNA; mol_type = other DNA
acaggagggctccttggcccccatc

SEQ ID NO: 16567 - DNA, 25 bp, synthetic construct
  source 1..25: mol_type = other DNA; mol_type = other DNA
acagggaggctccttggcccccatc

SEQ ID NO: 16568 - DNA, 25 bp, synthetic construct
  source 1..25: mol_type = other DNA; mol_type = other DNA
aacaggagggctccttggcccccat

SEQ ID NO: 16569 - DNA, 25 bp, synthetic construct
  source 1..25: mol_type = other DNA; mol_type = other DNA
aacagggaggctccttggcccccat

SEQ ID NO: 16570 - DNA, 25 bp, synthetic construct
  source 1..25: mol_type = other DNA; mol_type = other DNA
aaacaggtgggctccttggccccca

SEQ ID NO: 16571 - DNA, 25 bp, synthetic construct
  source 1..25: mol_type = other DNA; mol_type = other DNA
aaacagggtggctccttggccccca

SEQ ID NO: 16572 - DNA, 25 bp, synthetic construct
  source 1..25: mol_type = other DNA; mol_type = other DNA
aaaacaggtgggctccttggccccc

SEQ ID NO: 16573 - DNA, 25 bp, synthetic construct
  source 1..25: mol_type = other DNA; mol_type = other DNA
aaaacagggtggctccttggccccc

SEQ ID NO: 16574 - DNA, 25 bp, synthetic construct
  source 1..25: mol_type = other DNA; mol_type = other DNA
caaaacaggtgggctccttggcccc

SEQ ID NO: 16575 - DNA, 25 bp, synthetic construct
  source 1..25: mol_type = other DNA; mol_type = other DNA
caaaacagggtggctccttggcccc

SEQ ID NO: 16576 - DNA, 25 bp, synthetic construct
  source 1..25: mol_type = other DNA; mol_type = other DNA
gcaaaacaggtgggctccttggccc

SEQ ID NO: 16577 - DNA, 25 bp, synthetic construct
  source 1..25: mol_type = other DNA; mol_type = other DNA
gcaaaacagggtggctccttggccc

SEQ ID NO: 16578 - DNA, 25 bp, synthetic construct
  source 1..25: mol_type = other DNA; mol_type = other DNA
tgcaaaacaggtgggctccttggcc

SEQ ID NO: 16579 - DNA, 25 bp, synthetic construct
  source 1..25: mol_type = other DNA; mol_type = other DNA
tgcaaaacagggtggctccttggcc

SEQ ID NO: 16580 - DNA, 25 bp, synthetic construct
  source 1..25: mol_type = other DNA; mol_type = other DNA
atgcaaaacaggtgggctccttggc

SEQ ID NO: 16581 - DNA, 25 bp, synthetic construct
  source 1..25: mol_type = other DNA; mol_type = other DNA
atgcaaaacagggtggctccttggc

SEQ ID NO: 16582 - DNA, 25 bp, synthetic construct
  source 1..25: mol_type = other DNA; mol_type = other DNA
tatgcaaaacaggtgggctccttgg

SEQ ID NO: 16583 - DNA, 25 bp, synthetic construct
  source 1..25: mol_type = other DNA; mol_type = other DNA
tatgcaaaacagggtggctccttgg

SEQ ID NO: 16584 - DNA, 25 bp, synthetic construct
  source 1..25: mol_type = other DNA; mol_type = other DNA
atatgcaaaacaggtgggctccttg

SEQ ID NO: 16585 - DNA, 25 bp, synthetic construct
  source 1..25: mol_type = other DNA; mol_type = other DNA
atatgcaaaacagggtggctccttg

SEQ ID NO: 16586 - DNA, 25 bp, synthetic construct
  source 1..25: mol_type = other DNA; mol_type = other DNA
aatatgcaaaacaggtgggctcctt

SEQ ID NO: 16587 - DNA, 25 bp, synthetic construct
  source 1..25: mol_type = other DNA; mol_type = other DNA
aatatgcaaaacagggtggctcctt

SEQ ID NO: 16588 - DNA, 25 bp, synthetic construct
  source 1..25: mol_type = other DNA; mol_type = other DNA
aaatatgcaaaacaggtgggctcct

SEQ ID NO: 16589 - DNA, 25 bp, synthetic construct
  source 1..25: mol_type = other DNA; mol_type = other DNA
aaatatgcaaaacagggtggctcct

SEQ ID NO: 16590 - DNA, 25 bp, synthetic construct
  source 1..25: mol_type = other DNA; mol_type = other DNA
aaaatatgcaaaacaggtgggctcc

SEQ ID NO: 16591 - DNA, 25 bp, synthetic construct
  source 1..25: mol_type = other DNA; mol_type = other DNA
aaaatatgcaaaacagggtggctcc

SEQ ID NO: 16592 - DNA, 25 bp, synthetic construct
  source 1..25: mol_type = other DNA; mol_type = other DNA
taaaatatgcaaaacaggtgggctc

SEQ ID NO: 16593 - DNA, 25 bp, synthetic construct
  source 1..25: mol_type = other DNA; mol_type = other DNA
taaaatatgcaaaacagggtggctc

SEQ ID NO: 16594 - DNA, 25 bp, synthetic construct
  source 1..25: mol_type = other DNA; mol_type = other DNA
ttaaaatatgcaaaacaggtgggct

SEQ ID NO: 16595 - DNA, 25 bp, synthetic construct
  source 1..25: mol_type = other DNA; mol_type = other DNA
ttaaaatatgcaaaacagggtggct

SEQ ID NO: 16596 - DNA, 25 bp, synthetic construct
  source 1..25: mol_type = other DNA; mol_type = other DNA
gaagctccttggcccccatcgagaa

SEQ ID NO: 16597 - DNA, 25 bp, synthetic construct
  source 1..25: mol_type = other DNA; mol_type = other DNA
gagactccttggcccccatcgagaa

SEQ ID NO: 16598 - DNA, 25 bp, synthetic construct
  source 1..25: mol_type = other DNA; mol_type = other DNA
gaggctccttagcccccatcgagaa

SEQ ID NO: 16599 - DNA, 25 bp, synthetic construct
  source 1..25: mol_type = other DNA; mol_type = other DNA
gaggctccttgacccccatcgagaa

SEQ ID NO: 16600 - DNA, 25 bp, synthetic construct
  source 1..25: mol_type = other DNA; mol_type = other DNA
gaggctccttggcccccatcaagaa

SEQ ID NO: 16601 - DNA, 25 bp, synthetic construct
  source 1..25: mol_type = other DNA; mol_type = other DNA
gaggctccttggcccccatcgaaaa

SEQ ID NO: 16602 - DNA, 25 bp, synthetic construct
  source 1..25: mol_type = other DNA; mol_type = other DNA
gaaggctccttggcccccatcgaga

SEQ ID NO: 16603 - DNA, 25 bp, synthetic construct
  source 1..25: mol_type = other DNA; mol_type = other DNA
gagagctccttggcccccatcgaga

SEQ ID NO: 16604 - DNA, 25 bp, synthetic construct
  source 1..25: mol_type = other DNA; mol_type = other DNA
gaggactccttggcccccatcgaga

SEQ ID NO: 16605 - DNA, 25 bp, synthetic construct
  source 1..25: mol_type = other DNA; mol_type = other DNA
gagggctccttagcccccatcgaga

SEQ ID NO: 16606 - DNA, 25 bp, synthetic construct
  source 1..25: mol_type = other DNA; mol_type = other DNA
gagggctccttgacccccatcgaga

SEQ ID NO: 16607 - DNA, 25 bp, synthetic construct
  source 1..25: mol_type = other DNA; mol_type = other DNA
gagggctccttggcccccatcaaga

SEQ ID NO: 16608 - DNA, 25 bp, synthetic construct
  source 1..25: mol_type = other DNA; mol_type = other DNA
gagggctccttggcccccatcgaaa

SEQ ID NO: 16609 - DNA, 25 bp, synthetic construct
  source 1..25: mol_type = other DNA; mol_type = other DNA
ggaaggctccttggcccccatcgag

SEQ ID NO: 16610 - DNA, 25 bp, synthetic construct
  source 1..25: mol_type = other DNA; mol_type = other DNA
ggagagctccttggcccccatcgag

SEQ ID NO: 16611 - DNA, 25 bp, synthetic construct
  source 1..25: mol_type = other DNA; mol_type = other DNA
ggaggactccttggcccccatcgag

SEQ ID NO: 16612 - DNA, 25 bp, synthetic construct
  source 1..25: mol_type = other DNA; mol_type = other DNA
ggagggctccttagcccccatcgag

SEQ ID NO: 16613 - DNA, 25 bp, synthetic construct
  source 1..25: mol_type = other DNA; mol_type = other DNA
ggagggctccttgacccccatcgag

SEQ ID NO: 16614 - DNA, 25 bp, synthetic construct
  source 1..25: mol_type = other DNA; mol_type = other DNA
ggagggctccttggcccccatcaag

SEQ ID NO: 16615 - DNA, 25 bp, synthetic construct
  source 1..25: mol_type = other DNA; mol_type = other DNA
ggagggctccttggcccccatcgaa

SEQ ID NO: 16616 - DNA, 25 bp, synthetic construct
  source 1..25: mol_type = other DNA; mol_type = other DNA
aggaaggctccttggcccccatcga

SEQ ID NO: 16617 - DNA, 25 bp, synthetic construct
  source 1..25: mol_type = other DNA; mol_type = other DNA
aggagagctccttggcccccatcga

SEQ ID NO: 16618 - DNA, 25 bp, synthetic construct
  source 1..25: mol_type = other DNA; mol_type = other DNA
aggaggactccttggcccccatcga

SEQ ID NO: 16619 - DNA, 25 bp, synthetic construct
  source 1..25: mol_type = other DNA; mol_type = other DNA
aggagggctccttagcccccatcga

SEQ ID NO: 16620 - DNA, 25 bp, synthetic construct
  source 1..25: mol_type = other DNA; mol_type = other DNA
aggagggctccttgacccccatcga

SEQ ID NO: 16621 - DNA, 25 bp, synthetic construct
  source 1..25: mol_type = other DNA; mol_type = other DNA
aggagggctccttggcccccatcaa

SEQ ID NO: 16622 - DNA, 25 bp, synthetic construct
  source 1..25: mol_type = other DNA; mol_type = other DNA
caggaaggctccttggcccccatcg

SEQ ID NO: 16623 - DNA, 25 bp, synthetic construct
  source 1..25: mol_type = other DNA; mol_type = other DNA
caggagagctccttggcccccatcg

SEQ ID NO: 16624 - DNA, 25 bp, synthetic construct
  source 1..25: mol_type = other DNA; mol_type = other DNA
caggaggactccttggcccccatcg

SEQ ID NO: 16625 - DNA, 25 bp, synthetic construct
  source 1..25: mol_type = other DNA; mol_type = other DNA
caggagggctccttagcccccatcg

SEQ ID NO: 16626 - DNA, 25 bp, synthetic construct
  source 1..25: mol_type = other DNA; mol_type = other DNA
caggagggctccttgacccccatcg

SEQ ID NO: 16627 - DNA, 25 bp, synthetic construct
  source 1..25: mol_type = other DNA; mol_type = other DNA
caggagggctccttggcccccatca

SEQ ID NO: 16628 - DNA, 25 bp, synthetic construct
  source 1..25: mol_type = other DNA; mol_type = other DNA
acaggaaggctccttggcccccatc

SEQ ID NO: 16629 - DNA, 25 bp, synthetic construct
  source 1..25: mol_type = other DNA; mol_type = other DNA
acaggagagctccttggcccccatc

SEQ ID NO: 16630 - DNA, 25 bp, synthetic construct
  source 1..25: mol_type = other DNA; mol_type = other DNA
acaggaggactccttggcccccatc

SEQ ID NO: 16631 - DNA, 25 bp, synthetic construct
  source 1..25: mol_type = other DNA; mol_type = other DNA
acaggagggctccttagcccccatc

SEQ ID NO: 16632 - DNA, 25 bp, synthetic construct
  source 1..25: mol_type = other DNA; mol_type = other DNA
acaggagggctccttgacccccatc

SEQ ID NO: 16633 - DNA, 25 bp, synthetic construct
  source 1..25: mol_type = other DNA; mol_type = other DNA
aacaggaaggctccttggcccccat

SEQ ID NO: 16634 - DNA, 25 bp, synthetic construct
  source 1..25: mol_type = other DNA; mol_type = other DNA
aacaggagagctccttggcccccat

SEQ ID NO: 16635 - DNA, 25 bp, synthetic construct
  source 1..25: mol_type = other DNA; mol_type = other DNA
aacaggaggactccttggcccccat

SEQ ID NO: 16636 - DNA, 25 bp, synthetic construct
  source 1..25: mol_type = other DNA; mol_type = other DNA
aacaggagggctccttagcccccat

SEQ ID NO: 16637 - DNA, 25 bp, synthetic construct
  source 1..25: mol_type = other DNA; mol_type = other DNA
aacaggagggctccttgacccccat

SEQ ID NO: 16638 - DNA, 25 bp, synthetic construct
  source 1..25: mol_type = other DNA; mol_type = other DNA
aaacaggaaggctccttggccccca

SEQ ID NO: 16639 - DNA, 25 bp, synthetic construct
  source 1..25: mol_type = other DNA; mol_type = other DNA
aaacaggagagctccttggccccca

SEQ ID NO: 16640 - DNA, 25 bp, synthetic construct
  source 1..25: mol_type = other DNA; mol_type = other DNA
aaacaggaggactccttggccccca

SEQ ID NO: 16641 - DNA, 25 bp, synthetic construct
  source 1..25: mol_type = other DNA; mol_type = other DNA
aaacaggagggctccttagccccca

SEQ ID NO: 16642 - DNA, 25 bp, synthetic construct
  source 1..25: mol_type = other DNA; mol_type = other DNA
aaacaggagggctccttgaccccca

SEQ ID NO: 16643 - DNA, 25 bp, synthetic construct
  source 1..25: mol_type = other DNA; mol_type = other DNA
aaaacaggaaggctccttggccccc

SEQ ID NO: 16644 - DNA, 25 bp, synthetic construct
  source 1..25: mol_type = other DNA; mol_type = other DNA
aaaacaggagagctccttggccccc

SEQ ID NO: 16645 - DNA, 25 bp, synthetic construct
  source 1..25: mol_type = other DNA; mol_type = other DNA
aaaacaggaggactccttggccccc

SEQ ID NO: 16646 - DNA, 25 bp, synthetic construct
  source 1..25: mol_type = other DNA; mol_type = other DNA
aaaacaggagggctccttagccccc

SEQ ID NO: 16647 - DNA, 25 bp, synthetic construct
  source 1..25: mol_type = other DNA; mol_type = other DNA
aaaacaggagggctccttgaccccc

SEQ ID NO: 16648 - DNA, 25 bp, synthetic construct
  source 1..25: mol_type = other DNA; mol_type = other DNA
caaaacaggaaggctccttggcccc

SEQ ID NO: 16649 - DNA, 25 bp, synthetic construct
  source 1..25: mol_type = other DNA; mol_type = other DNA
caaaacaggagagctccttggcccc

SEQ ID NO: 16650 - DNA, 25 bp, synthetic construct
  source 1..25: mol_type = other DNA; mol_type = other DNA
caaaacaggaggactccttggcccc

SEQ ID NO: 16651 - DNA, 25 bp, synthetic construct
  source 1..25: mol_type = other DNA; mol_type = other DNA
caaaacaggagggctccttagcccc

SEQ ID NO: 16652 - DNA, 25 bp, synthetic construct
  source 1..25: mol_type = other DNA; mol_type = other DNA
caaaacaggagggctccttgacccc

SEQ ID NO: 16653 - DNA, 25 bp, synthetic construct
  source 1..25: mol_type = other DNA; mol_type = other DNA
acaaaacaggagggctccttggccc

SEQ ID NO: 16654 - DNA, 25 bp, synthetic construct
  source 1..25: mol_type = other DNA; mol_type = other DNA
gcaaaacaggaaggctccttggccc

SEQ ID NO: 16655 - DNA, 25 bp, synthetic construct
  source 1..25: mol_type = other DNA; mol_type = other DNA
gcaaaacaggagagctccttggccc

SEQ ID NO: 16656 - DNA, 25 bp, synthetic construct
  source 1..25: mol_type = other DNA; mol_type = other DNA
gcaaaacaggaggactccttggccc

SEQ ID NO: 16657 - DNA, 25 bp, synthetic construct
  source 1..25: mol_type = other DNA; mol_type = other DNA
gcaaaacaggagggctccttagccc

SEQ ID NO: 16658 - DNA, 25 bp, synthetic construct
  source 1..25: mol_type = other DNA; mol_type = other DNA
gcaaaacaggagggctccttgaccc

SEQ ID NO: 16659 - DNA, 25 bp, synthetic construct
  source 1..25: mol_type = other DNA; mol_type = other DNA
tacaaaacagggaggctccttggcc

SEQ ID NO: 16660 - DNA, 25 bp, synthetic construct
  source 1..25: mol_type = other DNA; mol_type = other DNA
tgcaaaacaggaaggctccttggcc

SEQ ID NO: 16661 - DNA, 25 bp, synthetic construct
  source 1..25: mol_type = other DNA; mol_type = other DNA
tgcaaaacaggagagctccttggcc

SEQ ID NO: 16662 - DNA, 25 bp, synthetic construct
  source 1..25: mol_type = other DNA; mol_type = other DNA
tgcaaaacaggaggactccttggcc

SEQ ID NO: 16663 - DNA, 25 bp, synthetic construct
  source 1..25: mol_type = other DNA; mol_type = other DNA
tgcaaaacaggagggctccttagcc

SEQ ID NO: 16664 - DNA, 25 bp, synthetic construct
  source 1..25: mol_type = other DNA; mol_type = other DNA
tgcaaaacaggagggctccttgacc

SEQ ID NO: 16665 - DNA, 25 bp, synthetic construct
  source 1..25: mol_type = other DNA; mol_type = other DNA
atacaaaacagggaggctccttggc

SEQ ID NO: 16666 - DNA, 25 bp, synthetic construct
  source 1..25: mol_type = other DNA; mol_type = other DNA
atgcaaaacaggaaggctccttggc

SEQ ID NO: 16667 - DNA, 25 bp, synthetic construct
  source 1..25: mol_type = other DNA; mol_type = other DNA
atgcaaaacaggagagctccttggc

SEQ ID NO: 16668 - DNA, 25 bp, synthetic construct
  source 1..25: mol_type = other DNA; mol_type = other DNA
atgcaaaacaggaggactccttggc

SEQ ID NO: 16669 - DNA, 25 bp, synthetic construct
  source 1..25: mol_type = other DNA; mol_type = other DNA
atgcaaaacaggagggctccttagc

SEQ ID NO: 16670 - DNA, 25 bp, synthetic construct
  source 1..25: mol_type = other DNA; mol_type = other DNA
atgcaaaacaggagggctccttgac

SEQ ID NO: 16671 - DNA, 25 bp, synthetic construct
  source 1..25: mol_type = other DNA; mol_type = other DNA
tatacaaaacagggaggctccttgg

SEQ ID NO: 16672 - DNA, 25 bp, synthetic construct
  source 1..25: mol_type = other DNA; mol_type = other DNA
tatgcaaaacaggaaggctccttgg

SEQ ID NO: 16673 - DNA, 25 bp, synthetic construct
  source 1..25: mol_type = other DNA; mol_type = other DNA
tatgcaaaacaggagagctccttgg

SEQ ID NO: 16674 - DNA, 25 bp, synthetic construct
  source 1..25: mol_type = other DNA; mol_type = other DNA
tatgcaaaacaggaggactccttgg

SEQ ID NO: 16675 - DNA, 25 bp, synthetic construct
  source 1..25: mol_type = other DNA; mol_type = other DNA
tatgcaaaacaggagggctccttag

SEQ ID NO: 16676 - DNA, 25 bp, synthetic construct
  source 1..25: mol_type = other DNA; mol_type = other DNA
tatgcaaaacaggagggctccttga

SEQ ID NO: 16677 - DNA, 25 bp, synthetic construct
  source 1..25: mol_type = other DNA; mol_type = other DNA
atatacaaaacagggaggctccttg

SEQ ID NO: 16678 - DNA, 25 bp, synthetic construct
  source 1..25: mol_type = other DNA; mol_type = other DNA
atatgcaaaacaggaaggctccttg

SEQ ID NO: 16679 - DNA, 25 bp, synthetic construct
  source 1..25: mol_type = other DNA; mol_type = other DNA
atatgcaaaacaggagagctccttg

SEQ ID NO: 16680 - DNA, 25 bp, synthetic construct
  source 1..25: mol_type = other DNA; mol_type = other DNA
atatgcaaaacaggaggactccttg

SEQ ID NO: 16681 - DNA, 25 bp, synthetic construct
  source 1..25: mol_type = other DNA; mol_type = other DNA
atatgcaaaacaggagggctcctta

SEQ ID NO: 16682 - DNA, 25 bp, synthetic construct
  source 1..25: mol_type = other DNA; mol_type = other DNA
aatatacaaaacagggaggctcctt

SEQ ID NO: 16683 - DNA, 25 bp, synthetic construct
  source 1..25: mol_type = other DNA; mol_type = other DNA
aatatgcaaaacagaagggctcctt

SEQ ID NO: 16684 - DNA, 25 bp, synthetic construct
  source 1..25: mol_type = other DNA; mol_type = other DNA
aatatgcaaaacagagaggctcctt

SEQ ID NO: 16685 - DNA, 25 bp, synthetic construct
  source 1..25: mol_type = other DNA; mol_type = other DNA
aatatgcaaaacagaggagctcctt

SEQ ID NO: 16686 - DNA, 25 bp, synthetic construct
  source 1..25: mol_type = other DNA; mol_type = other DNA
aatatgcaaaacagagggactcctt

SEQ ID NO: 16687 - DNA, 25 bp, synthetic construct
  source 1..25: mol_type = other DNA; mol_type = other DNA
aaatatacaaaacagggaggctcct

SEQ ID NO: 16688 - DNA, 25 bp, synthetic construct
  source 1..25: mol_type = other DNA; mol_type = other DNA
aaatatgcaaaacagaagggctcct

SEQ ID NO: 16689 - DNA, 25 bp, synthetic construct
  source 1..25: mol_type = other DNA; mol_type = other DNA
aaatatgcaaaacagagaggctcct

SEQ ID NO: 16690 - DNA, 25 bp, synthetic construct
  source 1..25: mol_type = other DNA; mol_type = other DNA
aaatatgcaaaacagaggagctcct

SEQ ID NO: 16691 - DNA, 25 bp, synthetic construct
  source 1..25: mol_type = other DNA; mol_type = other DNA
aaatatgcaaaacagagggactcct

SEQ ID NO: 16692 - DNA, 25 bp, synthetic construct
  source 1..25: mol_type = other DNA; mol_type = other DNA
aaaatatacaaaacagggaggctcc

SEQ ID NO: 16693 - DNA, 25 bp, synthetic construct
  source 1..25: mol_type = other DNA; mol_type = other DNA
aaaatatgcaaaacagaagggctcc

SEQ ID NO: 16694 - DNA, 25 bp, synthetic construct
  source 1..25: mol_type = other DNA; mol_type = other DNA
aaaatatgcaaaacagagaggctcc

SEQ ID NO: 16695 - DNA, 25 bp, synthetic construct
  source 1..25: mol_type = other DNA; mol_type = other DNA
aaaatatgcaaaacagaggagctcc

SEQ ID NO: 16696 - DNA, 25 bp, synthetic construct
  source 1..25: mol_type = other DNA; mol_type = other DNA
aaaatatgcaaaacagagggactcc

SEQ ID NO: 16697 - DNA, 25 bp, synthetic construct
  source 1..25: mol_type = other DNA; mol_type = other DNA
taaaatatacaaaacagggaggctc

SEQ ID NO: 16698 - DNA, 25 bp, synthetic construct
  source 1..25: mol_type = other DNA; mol_type = other DNA
taaaatatgcaaaacagaagggctc

SEQ ID NO: 16699 - DNA, 25 bp, synthetic construct
  source 1..25: mol_type = other DNA; mol_type = other DNA
taaaatatgcaaaacagagaggctc

SEQ ID NO: 16700 - DNA, 25 bp, synthetic construct
  source 1..25: mol_type = other DNA; mol_type = other DNA
taaaatatgcaaaacagaggagctc

SEQ ID NO: 16701 - DNA, 25 bp, synthetic construct
  source 1..25: mol_type = other DNA; mol_type = other DNA
taaaatatgcaaaacagagggactc

SEQ ID NO: 16702 - DNA, 25 bp, synthetic construct
  source 1..25: mol_type = other DNA; mol_type = other DNA
ttaaaatatacaaaacagggaggct

SEQ ID NO: 16703 - DNA, 25 bp, synthetic construct
  source 1..25: mol_type = other DNA; mol_type = other DNA
ttaaaatatgcaaaacagaagggct

SEQ ID NO: 16704 - DNA, 25 bp, synthetic construct
  source 1..25: mol_type = other DNA; mol_type = other DNA
ttaaaatatgcaaaacagagaggct

SEQ ID NO: 16705 - DNA, 25 bp, synthetic construct
  source 1..25: mol_type = other DNA; mol_type = other DNA
ttaaaatatgcaaaacagaggagct

SEQ ID NO: 16706 - DNA, 25 bp, synthetic construct
  source 1..25: mol_type = other DNA; mol_type = other DNA
ttaaaatatgcaaaacagagggact

SEQ ID NO: 16707 - DNA, 25 bp, synthetic construct
  source 1..25: mol_type = other DNA; mol_type = other DNA
tggcagtggcagtgatgggccggag

SEQ ID NO: 16708 - DNA, 25 bp, synthetic construct
  source 1..25: mol_type = other DNA; mol_type = other DNA
tggcagtggcagtgagtggccggag

SEQ ID NO: 16709 - DNA, 25 bp, synthetic construct
  source 1..25: mol_type = other DNA; mol_type = other DNA
tggcagtggcagtgaggtgccggag

SEQ ID NO: 16710 - DNA, 25 bp, synthetic construct
  source 1..25: mol_type = other DNA; mol_type = other DNA
tggcagtggcagtgagggtccggag

SEQ ID NO: 16711 - DNA, 25 bp, synthetic construct
  source 1..25: mol_type = other DNA; mol_type = other DNA
gtggcagtggcagtgatgggccgga

SEQ ID NO: 16712 - DNA, 25 bp, synthetic construct
  source 1..25: mol_type = other DNA; mol_type = other DNA
gtggcagtggcagtgagtggccgga

SEQ ID NO: 16713 - DNA, 25 bp, synthetic construct
  source 1..25: mol_type = other DNA; mol_type = other DNA
gtggcagtggcagtgaggtgccgga

SEQ ID NO: 16714 - DNA, 25 bp, synthetic construct
  source 1..25: mol_type = other DNA; mol_type = other DNA
gtggcagtggcagtgagggtccgga

SEQ ID NO: 16715 - DNA, 25 bp, synthetic construct
  source 1..25: mol_type = other DNA; mol_type = other DNA
ggtggcagtggcagtgaagggccgg

SEQ ID NO: 16716 - DNA, 25 bp, synthetic construct
  source 1..25: mol_type = other DNA; mol_type = other DNA
ggtggcagtggcagtgagaggccgg

SEQ ID NO: 16717 - DNA, 25 bp, synthetic construct
  source 1..25: mol_type = other DNA; mol_type = other DNA
ggtggcagtggcagtgaggagccgg

SEQ ID NO: 16718 - DNA, 25 bp, synthetic construct
  source 1..25: mol_type = other DNA; mol_type = other DNA
ggtggcagtggcagtgagggaccgg

SEQ ID NO: 16719 - DNA, 25 bp, synthetic construct
  source 1..25: mol_type = other DNA; mol_type = other DNA
gggtggcagtggcagtgaagggccg

SEQ ID NO: 16720 - DNA, 25 bp, synthetic construct
  source 1..25: mol_type = other DNA; mol_type = other DNA
gggtggcagtggcagtgagaggccg

SEQ ID NO: 16721 - DNA, 25 bp, synthetic construct
  source 1..25: mol_type = other DNA; mol_type = other DNA
gggtggcagtggcagtgaggagccg

SEQ ID NO: 16722 - DNA, 25 bp, synthetic construct
  source 1..25: mol_type = other DNA; mol_type = other DNA
gggtggcagtggcagtgagggaccg

SEQ ID NO: 16723 - DNA, 25 bp, synthetic construct
  source 1..25: mol_type = other DNA; mol_type = other DNA
tgtagggtggcagtggcagtgaggg

SEQ ID NO: 16724 - DNA, 25 bp, synthetic construct
  source 1..25: mol_type = other DNA; mol_type = other DNA
tgtgaggtggcagtggcagtgaggg

SEQ ID NO: 16725 - DNA, 25 bp, synthetic construct
  source 1..25: mol_type = other DNA; mol_type = other DNA
tgtggagtggcagtggcagtgaggg

SEQ ID NO: 16726 - DNA, 25 bp, synthetic construct
  source 1..25: mol_type = other DNA; mol_type = other DNA
tgtgggatggcagtggcagtgaggg

SEQ ID NO: 16727 - DNA, 25 bp, synthetic construct
  source 1..25: mol_type = other DNA; mol_type = other DNA
ttgtagggtggcagtggcagtgagg

SEQ ID NO: 16728 - DNA, 25 bp, synthetic construct
  source 1..25: mol_type = other DNA; mol_type = other DNA
ttgtgaggtggcagtggcagtgagg

SEQ ID NO: 16729 - DNA, 25 bp, synthetic construct
  source 1..25: mol_type = other DNA; mol_type = other DNA
ttgtggagtggcagtggcagtgagg

SEQ ID NO: 16730 - DNA, 25 bp, synthetic construct
  source 1..25: mol_type = other DNA; mol_type = other DNA
ttgtgggatggcagtggcagtgagg

SEQ ID NO: 16731 - DNA, 25 bp, synthetic construct
  source 1..25: mol_type = other DNA; mol_type = other DNA
gttgtagggtggcagtggcagtgag

SEQ ID NO: 16732 - DNA, 25 bp, synthetic construct
  source 1..25: mol_type = other DNA; mol_type = other DNA
gttgtgaggtggcagtggcagtgag

SEQ ID NO: 16733 - DNA, 25 bp, synthetic construct
  source 1..25: mol_type = other DNA; mol_type = other DNA
gttgtggagtggcagtggcagtgag

SEQ ID NO: 16734 - DNA, 25 bp, synthetic construct
  source 1..25: mol_type = other DNA; mol_type = other DNA
gttgtgggatggcagtggcagtgag

SEQ ID NO: 16735 - DNA, 25 bp, synthetic construct
  source 1..25: mol_type = other DNA; mol_type = other DNA
cgttgtagggtggcagtggcagtga

SEQ ID NO: 16736 - DNA, 25 bp, synthetic construct
  source 1..25: mol_type = other DNA; mol_type = other DNA
cgttgtgaggtggcagtggcagtga

SEQ ID NO: 16737 - DNA, 25 bp, synthetic construct
  source 1..25: mol_type = other DNA; mol_type = other DNA
cgttgtggagtggcagtggcagtga

SEQ ID NO: 16738 - DNA, 25 bp, synthetic construct
  source 1..25: mol_type = other DNA; mol_type = other DNA
cgttgtgggatggcagtggcagtga

SEQ ID NO: 16739 - DNA, 25 bp, synthetic construct
  source 1..25: mol_type = other DNA; mol_type = other DNA
ccgttgtagggtggcagtggcagtg

SEQ ID NO: 16740 - DNA, 25 bp, synthetic construct
  source 1..25: mol_type = other DNA; mol_type = other DNA
ccgttgtgaggtggcagtggcagtg

SEQ ID NO: 16741 - DNA, 25 bp, synthetic construct
  source 1..25: mol_type = other DNA; mol_type = other DNA
ccgttgtggagtggcagtggcagtg

SEQ ID NO: 16742 - DNA, 25 bp, synthetic construct
  source 1..25: mol_type = other DNA; mol_type = other DNA
ccgttgtgggatggcagtggcagtg

SEQ ID NO: 16743 - DNA, 25 bp, synthetic construct
  source 1..25: mol_type = other DNA; mol_type = other DNA
cccgttgtagggtggcagtggcagt

SEQ ID NO: 16744 - DNA, 25 bp, synthetic construct
  source 1..25: mol_type = other DNA; mol_type = other DNA
cccgttgtgaggtggcagtggcagt

SEQ ID NO: 16745 - DNA, 25 bp, synthetic construct
  source 1..25: mol_type = other DNA; mol_type = other DNA
cccgttgtggagtggcagtggcagt

SEQ ID NO: 16746 - DNA, 25 bp, synthetic construct
  source 1..25: mol_type = other DNA; mol_type = other DNA
cccgttgtgggatggcagtggcagt

SEQ ID NO: 16747 - DNA, 25 bp, synthetic construct
  source 1..25: mol_type = other DNA; mol_type = other DNA
ccccgttgtagggtggcagtggcag

SEQ ID NO: 16748 - DNA, 25 bp, synthetic construct
  source 1..25: mol_type = other DNA; mol_type = other DNA
ccccgttgtgaggtggcagtggcag

SEQ ID NO: 16749 - DNA, 25 bp, synthetic construct
  source 1..25: mol_type = other DNA; mol_type = other DNA
ccccgttgtggagtggcagtggcag

SEQ ID NO: 16750 - DNA, 25 bp, synthetic construct
  source 1..25: mol_type = other DNA; mol_type = other DNA
ccccgttgtgggatggcagtggcag

SEQ ID NO: 16751 - DNA, 25 bp, synthetic construct
  source 1..25: mol_type = other DNA; mol_type = other DNA
gccccgttgtagggtggcagtggca

SEQ ID NO: 16752 - DNA, 25 bp, synthetic construct
  source 1..25: mol_type = other DNA; mol_type = other DNA
gccccgttgtgaggtggcagtggca

SEQ ID NO: 16753 - DNA, 25 bp, synthetic construct
  source 1..25: mol_type = other DNA; mol_type = other DNA
gccccgttgtggagtggcagtggca

SEQ ID NO: 16754 - DNA, 25 bp, synthetic construct
  source 1..25: mol_type = other DNA; mol_type = other DNA
gccccgttgtgggatggcagtggca

SEQ ID NO: 16755 - DNA, 25 bp, synthetic construct
  source 1..25: mol_type = other DNA; mol_type = other DNA
tgccccgttgtagggtggcagtggc

SEQ ID NO: 16756 - DNA, 25 bp, synthetic construct
  source 1..25: mol_type = other DNA; mol_type = other DNA
tgccccgttgtgaggtggcagtggc

SEQ ID NO: 16757 - DNA, 25 bp, synthetic construct
  source 1..25: mol_type = other DNA; mol_type = other DNA
tgccccgttgtggagtggcagtggc

SEQ ID NO: 16758 - DNA, 25 bp, synthetic construct
  source 1..25: mol_type = other DNA; mol_type = other DNA
tgccccgttgtgggatggcagtggc

SEQ ID NO: 16759 - DNA, 25 bp, synthetic construct
  source 1..25: mol_type = other DNA; mol_type = other DNA
ctgccccgttgtagggtggcagtgg

SEQ ID NO: 16760 - DNA, 25 bp, synthetic construct
  source 1..25: mol_type = other DNA; mol_type = other DNA
ctgccccgttgtgaggtggcagtgg

SEQ ID NO: 16761 - DNA, 25 bp, synthetic construct
  source 1..25: mol_type = other DNA; mol_type = other DNA
ctgccccgttgtggagtggcagtgg

SEQ ID NO: 16762 - DNA, 25 bp, synthetic construct
  source 1..25: mol_type = other DNA; mol_type = other DNA
ctgccccgttgtgggatggcagtgg

SEQ ID NO: 16763 - DNA, 25 bp, synthetic construct
  source 1..25: mol_type = other DNA; mol_type = other DNA
cctgccccgttgtagggtggcagtg

SEQ ID NO: 16764 - DNA, 25 bp, synthetic construct
  source 1..25: mol_type = other DNA; mol_type = other DNA
cctgccccgttgtgaggtggcagtg

SEQ ID NO: 16765 - DNA, 25 bp, synthetic construct
  source 1..25: mol_type = other DNA; mol_type = other DNA
cctgccccgttgtggagtggcagtg

SEQ ID NO: 16766 - DNA, 25 bp, synthetic construct
  source 1..25: mol_type = other DNA; mol_type = other DNA
cctgccccgttgtgggatggcagtg

SEQ ID NO: 16767 - DNA, 25 bp, synthetic construct
  source 1..25: mol_type = other DNA; mol_type = other DNA
tagcagtggcagtgaggagccggag

SEQ ID NO: 16768 - DNA, 25 bp, synthetic construct
  source 1..25: mol_type = other DNA; mol_type = other DNA
tagcagtggcagtgagggaccggag

SEQ ID NO: 16769 - DNA, 25 bp, synthetic construct
  source 1..25: mol_type = other DNA; mol_type = other DNA
tgacagtggcagtgaagggccggag

SEQ ID NO: 16770 - DNA, 25 bp, synthetic construct
  source 1..25: mol_type = other DNA; mol_type = other DNA
tgacagtggcagtgagaggccggag

SEQ ID NO: 16771 - DNA, 25 bp, synthetic construct
  source 1..25: mol_type = other DNA; mol_type = other DNA
tgacagtggcagtgaggagccggag

SEQ ID NO: 16772 - DNA, 25 bp, synthetic construct
  source 1..25: mol_type = other DNA; mol_type = other DNA
tgacagtggcagtgagggaccggag

SEQ ID NO: 16773 - DNA, 25 bp, synthetic construct
  source 1..25: mol_type = other DNA; mol_type = other DNA
gtagcagtggcagtgaagggccgga

SEQ ID NO: 16774 - DNA, 25 bp, synthetic construct
  source 1..25: mol_type = other DNA; mol_type = other DNA
gtagcagtggcagtgagaggccgga

SEQ ID NO: 16775 - DNA, 25 bp, synthetic construct
  source 1..25: mol_type = other DNA; mol_type = other DNA
gtagcagtggcagtgaggagccgga

SEQ ID NO: 16776 - DNA, 25 bp, synthetic construct
  source 1..25: mol_type = other DNA; mol_type = other DNA
gtgacagtggcagtgagaggccgga

SEQ ID NO: 16777 - DNA, 25 bp, synthetic construct
  source 1..25: mol_type = other DNA; mol_type = other DNA
gtgacagtggcagtgaggagccgga

SEQ ID NO: 16778 - DNA, 25 bp, synthetic construct
  source 1..25: mol_type = other DNA; mol_type = other DNA
gtggcaatggcagtgagaggccgga

SEQ ID NO: 16779 - DNA, 25 bp, synthetic construct
  source 1..25: mol_type = other DNA; mol_type = other DNA
gtggcaatggcagtgaggagccgga

SEQ ID NO: 16780 - DNA, 25 bp, synthetic construct
  source 1..25: mol_type = other DNA; mol_type = other DNA
agtggcagtggcagtgagaggccgg

SEQ ID NO: 16781 - DNA, 25 bp, synthetic construct
  source 1..25: mol_type = other DNA; mol_type = other DNA
agtggcagtggcagtgaggagccgg

SEQ ID NO: 16782 - DNA, 25 bp, synthetic construct
  source 1..25: mol_type = other DNA; mol_type = other DNA
gatggcagtggcagtgagaggccgg

SEQ ID NO: 16783 - DNA, 25 bp, synthetic construct
  source 1..25: mol_type = other DNA; mol_type = other DNA
gatggcagtggcagtgaggagccgg

SEQ ID NO: 16784 - DNA, 25 bp, synthetic construct
  source 1..25: mol_type = other DNA; mol_type = other DNA
ggtagcagtggcagtgagaggccgg

SEQ ID NO: 16785 - DNA, 25 bp, synthetic construct
  source 1..25: mol_type = other DNA; mol_type = other DNA
ggtagcagtggcagtgaggagccgg

SEQ ID NO: 16786 - DNA, 25 bp, synthetic construct
  source 1..25: mol_type = other DNA; mol_type = other DNA
aggtggcagtggcagtgagaggccg

SEQ ID NO: 16787 - DNA, 25 bp, synthetic construct
  source 1..25: mol_type = other DNA; mol_type = other DNA
aggtggcagtggcagtgaggagccg

SEQ ID NO: 16788 - DNA, 25 bp, synthetic construct
  source 1..25: mol_type = other DNA; mol_type = other DNA
gagtggcagtggcagtgagaggccg

SEQ ID NO: 16789 - DNA, 25 bp, synthetic construct
  source 1..25: mol_type = other DNA; mol_type = other DNA
gagtggcagtggcagtgaggagccg

SEQ ID NO: 16790 - DNA, 25 bp, synthetic construct
  source 1..25: mol_type = other DNA; mol_type = other DNA
ggatggcagtggcagtgagaggccg

SEQ ID NO: 16791 - DNA, 25 bp, synthetic construct
  source 1..25: mol_type = other DNA; mol_type = other DNA
ggatggcagtggcagtgaggagccg

SEQ ID NO: 16792 - DNA, 25 bp, synthetic construct
  source 1..25: mol_type = other DNA; mol_type = other DNA
agggtggcagtggcagtgagaggcc

SEQ ID NO: 16793 - DNA, 25 bp, synthetic construct
  source 1..25: mol_type = other DNA; mol_type = other DNA
agggtggcagtggcagtgaggagcc

SEQ ID NO: 16794 - DNA, 25 bp, synthetic construct
  source 1..25: mol_type = other DNA; mol_type = other DNA
gaggtggcagtggcagtgagaggcc

SEQ ID NO: 16795 - DNA, 25 bp, synthetic construct
  source 1..25: mol_type = other DNA; mol_type = other DNA
gaggtggcagtggcagtgaggagcc

SEQ ID NO: 16796 - DNA, 25 bp, synthetic construct
  source 1..25: mol_type = other DNA; mol_type = other DNA
ggagtggcagtggcagtgagaggcc

SEQ ID NO: 16797 - DNA, 25 bp, synthetic construct
  source 1..25: mol_type = other DNA; mol_type = other DNA
ggagtggcagtggcagtgaggagcc

SEQ ID NO: 16798 - DNA, 25 bp, synthetic construct
  source 1..25: mol_type = other DNA; mol_type = other DNA
tagggtggcagtggcagtgagaggc

SEQ ID NO: 16799 - DNA, 25 bp, synthetic construct
  source 1..25: mol_type = other DNA; mol_type = other DNA
tagggtggcagtggcagtgaggagc

SEQ ID NO: 16800 - DNA, 25 bp, synthetic construct
  source 1..25: mol_type = other DNA; mol_type = other DNA
tgaggtggcagtggcagtgagaggc

SEQ ID NO: 16801 - DNA, 25 bp, synthetic construct
  source 1..25: mol_type = other DNA; mol_type = other DNA
tgaggtggcagtggcagtgaggagc

SEQ ID NO: 16802 - DNA, 25 bp, synthetic construct
  source 1..25: mol_type = other DNA; mol_type = other DNA
tggagtggcagtggcagtgagaggc

SEQ ID NO: 16803 - DNA, 25 bp, synthetic construct
  source 1..25: mol_type = other DNA; mol_type = other DNA
tggagtggcagtggcagtgaggagc

SEQ ID NO: 16804 - DNA, 25 bp, synthetic construct
  source 1..25: mol_type = other DNA; mol_type = other DNA
gtagggtggcagtggcagtgagagg

SEQ ID NO: 16805 - DNA, 25 bp, synthetic construct
  source 1..25: mol_type = other DNA; mol_type = other DNA
gtagggtggcagtggcagtgaggag

SEQ ID NO: 16806 - DNA, 25 bp, synthetic construct
  source 1..25: mol_type = other DNA; mol_type = other DNA
gtgaggtggcagtggcagtgagagg

SEQ ID NO: 16807 - DNA, 25 bp, synthetic construct
  source 1..25: mol_type = other DNA; mol_type = other DNA
gtgaggtggcagtggcagtgaggag

SEQ ID NO: 16808 - DNA, 25 bp, synthetic construct
  source 1..25: mol_type = other DNA; mol_type = other DNA
gtggagtggcagtggcagtgagagg

SEQ ID NO: 16809 - DNA, 25 bp, synthetic construct
  source 1..25: mol_type = other DNA; mol_type = other DNA
gtggagtggcagtggcagtgaggag

SEQ ID NO: 16810 - DNA, 25 bp, synthetic construct
  source 1..25: mol_type = other DNA; mol_type = other DNA
tatgaggtggcagtggcagtgaggg

SEQ ID NO: 16811 - DNA, 25 bp, synthetic construct
  source 1..25: mol_type = other DNA; mol_type = other DNA
tatggagtggcagtggcagtgaggg

SEQ ID NO: 16812 - DNA, 25 bp, synthetic construct
  source 1..25: mol_type = other DNA; mol_type = other DNA
tgtagggtggcagtggcagtgaagg

SEQ ID NO: 16813 - DNA, 25 bp, synthetic construct
  source 1..25: mol_type = other DNA; mol_type = other DNA
tgtagggtggcagtggcagtgagag

SEQ ID NO: 16814 - DNA, 25 bp, synthetic construct
  source 1..25: mol_type = other DNA; mol_type = other DNA
tgtgaagtggcagtggcagtgaggg

SEQ ID NO: 16815 - DNA, 25 bp, synthetic construct
  source 1..25: mol_type = other DNA; mol_type = other DNA
tgtgaggtggcagtggcagtgagag

SEQ ID NO: 16816 - DNA, 25 bp, synthetic construct
  source 1..25: mol_type = other DNA; mol_type = other DNA
ttatggagtggcagtggcagtgagg

SEQ ID NO: 16817 - DNA, 25 bp, synthetic construct
  source 1..25: mol_type = other DNA; mol_type = other DNA
ttgtaaggtggcagtggcagtgagg

SEQ ID NO: 16818 - DNA, 25 bp, synthetic construct
  source 1..25: mol_type = other DNA; mol_type = other DNA
ttgtagagtggcagtggcagtgagg

SEQ ID NO: 16819 - DNA, 25 bp, synthetic construct
  source 1..25: mol_type = other DNA; mol_type = other DNA
ttgtaggatggcagtggcagtgagg

SEQ ID NO: 16820 - DNA, 25 bp, synthetic construct
  source 1..25: mol_type = other DNA; mol_type = other DNA
ttgtgaagtggcagtggcagtgagg

SEQ ID NO: 16821 - DNA, 25 bp, synthetic construct
  source 1..25: mol_type = other DNA; mol_type = other DNA
ttgtgagatggcagtggcagtgagg

SEQ ID NO: 16822 - DNA, 25 bp, synthetic construct
  source 1..25: mol_type = other DNA; mol_type = other DNA
attgtgaggtggcagtggcagtgag

SEQ ID NO: 16823 - DNA, 25 bp, synthetic construct
  source 1..25: mol_type = other DNA; mol_type = other DNA
attgtggagtggcagtggcagtgag

SEQ ID NO: 16824 - DNA, 25 bp, synthetic construct
  source 1..25: mol_type = other DNA; mol_type = other DNA
gttatgaggtggcagtggcagtgag

SEQ ID NO: 16825 - DNA, 25 bp, synthetic construct
  source 1..25: mol_type = other DNA; mol_type = other DNA
gttatggagtggcagtggcagtgag

SEQ ID NO: 16826 - DNA, 25 bp, synthetic construct
  source 1..25: mol_type = other DNA; mol_type = other DNA
gttgtaaggtggcagtggcagtgag

SEQ ID NO: 16827 - DNA, 25 bp, synthetic construct
  source 1..25: mol_type = other DNA; mol_type = other DNA
gttgtagagtggcagtggcagtgag

SEQ ID NO: 16828 - DNA, 25 bp, synthetic construct
  source 1..25: mol_type = other DNA; mol_type = other DNA
cattgtgaggtggcagtggcagtga

SEQ ID NO: 16829 - DNA, 25 bp, synthetic construct
  source 1..25: mol_type = other DNA; mol_type = other DNA
cattgtggagtggcagtggcagtga

SEQ ID NO: 16830 - DNA, 25 bp, synthetic construct
  source 1..25: mol_type = other DNA; mol_type = other DNA
cgttatgaggtggcagtggcagtga

SEQ ID NO: 16831 - DNA, 25 bp, synthetic construct
  source 1..25: mol_type = other DNA; mol_type = other DNA
cgttatggagtggcagtggcagtga

SEQ ID NO: 16832 - DNA, 25 bp, synthetic construct
  source 1..25: mol_type = other DNA; mol_type = other DNA
cgttgtaaggtggcagtggcagtga

SEQ ID NO: 16833 - DNA, 25 bp, synthetic construct
  source 1..25: mol_type = other DNA; mol_type = other DNA
cgttgtagagtggcagtggcagtga

SEQ ID NO: 16834 - DNA, 25 bp, synthetic construct
  source 1..25: mol_type = other DNA; mol_type = other DNA
ccattgtgaggtggcagtggcagtg

SEQ ID NO: 16835 - DNA, 25 bp, synthetic construct
  source 1..25: mol_type = other DNA; mol_type = other DNA
ccattgtggagtggcagtggcagtg

SEQ ID NO: 16836 - DNA, 25 bp, synthetic construct
  source 1..25: mol_type = other DNA; mol_type = other DNA
ccgttatgaggtggcagtggcagtg

SEQ ID NO: 16837 - DNA, 25 bp, synthetic construct
  source 1..25: mol_type = other DNA; mol_type = other DNA
ccgttatggagtggcagtggcagtg

SEQ ID NO: 16838 - DNA, 25 bp, synthetic construct
  source 1..25: mol_type = other DNA; mol_type = other DNA
ccgttgtaaggtggcagtggcagtg

SEQ ID NO: 16839 - DNA, 25 bp, synthetic construct
  source 1..25: mol_type = other DNA; mol_type = other DNA
ccgttgtagagtggcagtggcagtg

SEQ ID NO: 16840 - DNA, 25 bp, synthetic construct
  source 1..25: mol_type = other DNA; mol_type = other DNA
cccattgtgaggtggcagtggcagt

SEQ ID NO: 16841 - DNA, 25 bp, synthetic construct
  source 1..25: mol_type = other DNA; mol_type = other DNA
cccattgtggagtggcagtggcagt

SEQ ID NO: 16842 - DNA, 25 bp, synthetic construct
  source 1..25: mol_type = other DNA; mol_type = other DNA
cccgttatgaggtggcagtggcagt

SEQ ID NO: 16843 - DNA, 25 bp, synthetic construct
  source 1..25: mol_type = other DNA; mol_type = other DNA
cccgttatggagtggcagtggcagt

SEQ ID NO: 16844 - DNA, 25 bp, synthetic construct
  source 1..25: mol_type = other DNA; mol_type = other DNA
cccgttgtaaggtggcagtggcagt

SEQ ID NO: 16845 - DNA, 25 bp, synthetic construct
  source 1..25: mol_type = other DNA; mol_type = other DNA
cccgttgtagagtggcagtggcagt

SEQ ID NO: 16846 - DNA, 25 bp, synthetic construct
  source 1..25: mol_type = other DNA; mol_type = other DNA
ccccattgtgaggtggcagtggcag

SEQ ID NO: 16847 - DNA, 25 bp, synthetic construct
  source 1..25: mol_type = other DNA; mol_type = other DNA
ccccattgtggagtggcagtggcag

SEQ ID NO: 16848 - DNA, 25 bp, synthetic construct
  source 1..25: mol_type = other DNA; mol_type = other DNA
ccccgttatgaggtggcagtggcag

SEQ ID NO: 16849 - DNA, 25 bp, synthetic construct
  source 1..25: mol_type = other DNA; mol_type = other DNA
ccccgttatggagtggcagtggcag

SEQ ID NO: 16850 - DNA, 25 bp, synthetic construct
  source 1..25: mol_type = other DNA; mol_type = other DNA
ccccgttgtaaggtggcagtggcag

SEQ ID NO: 16851 - DNA, 25 bp, synthetic construct
  source 1..25: mol_type = other DNA; mol_type = other DNA
ccccgttgtagagtggcagtggcag

SEQ ID NO: 16852 - DNA, 25 bp, synthetic construct
  source 1..25: mol_type = other DNA; mol_type = other DNA
accccgttgtgaggtggcagtggca

SEQ ID NO: 16853 - DNA, 25 bp, synthetic construct
  source 1..25: mol_type = other DNA; mol_type = other DNA
accccgttgtggagtggcagtggca

SEQ ID NO: 16854 - DNA, 25 bp, synthetic construct
  source 1..25: mol_type = other DNA; mol_type = other DNA
gccccattgtgaggtggcagtggca

SEQ ID NO: 16855 - DNA, 25 bp, synthetic construct
  source 1..25: mol_type = other DNA; mol_type = other DNA
gccccattgtggagtggcagtggca

SEQ ID NO: 16856 - DNA, 25 bp, synthetic construct
  source 1..25: mol_type = other DNA; mol_type = other DNA
gccccgttatgaggtggcagtggca

SEQ ID NO: 16857 - DNA, 25 bp, synthetic construct
  source 1..25: mol_type = other DNA; mol_type = other DNA
gccccgttatggagtggcagtggca

SEQ ID NO: 16858 - DNA, 25 bp, synthetic construct
  source 1..25: mol_type = other DNA; mol_type = other DNA
taccccgttgtgaggtggcagtggc

SEQ ID NO: 16859 - DNA, 25 bp, synthetic construct
  source 1..25: mol_type = other DNA; mol_type = other DNA
taccccgttgtggagtggcagtggc

SEQ ID NO: 16860 - DNA, 25 bp, synthetic construct
  source 1..25: mol_type = other DNA; mol_type = other DNA
tgccccattgtgaggtggcagtggc

SEQ ID NO: 16861 - DNA, 25 bp, synthetic construct
  source 1..25: mol_type = other DNA; mol_type = other DNA
tgccccattgtggagtggcagtggc

SEQ ID NO: 16862 - DNA, 25 bp, synthetic construct
  source 1..25: mol_type = other DNA; mol_type = other DNA
tgccccgttatgaggtggcagtggc

SEQ ID NO: 16863 - DNA, 25 bp, synthetic construct
  source 1..25: mol_type = other DNA; mol_type = other DNA
tgccccgttatggagtggcagtggc

SEQ ID NO: 16864 - DNA, 25 bp, synthetic construct
  source 1..25: mol_type = other DNA; mol_type = other DNA
ctaccccgttgtgaggtggcagtgg

SEQ ID NO: 16865 - DNA, 25 bp, synthetic construct
  source 1..25: mol_type = other DNA; mol_type = other DNA
ctaccccgttgtggagtggcagtgg

SEQ ID NO: 16866 - DNA, 25 bp, synthetic construct
  source 1..25: mol_type = other DNA; mol_type = other DNA
ctgccccattgtgaggtggcagtgg

SEQ ID NO: 16867 - DNA, 25 bp, synthetic construct
  source 1..25: mol_type = other DNA; mol_type = other DNA
ctgccccattgtggagtggcagtgg

SEQ ID NO: 16868 - DNA, 25 bp, synthetic construct
  source 1..25: mol_type = other DNA; mol_type = other DNA
ctgccccattgtgggatggcagtgg

SEQ ID NO: 16869 - DNA, 25 bp, synthetic construct
  source 1..25: mol_type = other DNA; mol_type = other DNA
ctgccccgttatagggtggcagtgg

SEQ ID NO: 16870 - DNA, 25 bp, synthetic construct
  source 1..25: mol_type = other DNA; mol_type = other DNA
cctaccccgttgtgaggtggcagtg

SEQ ID NO: 16871 - DNA, 25 bp, synthetic construct
  source 1..25: mol_type = other DNA; mol_type = other DNA
cctaccccgttgtggagtggcagtg

SEQ ID NO: 16872 - DNA, 25 bp, synthetic construct
  source 1..25: mol_type = other DNA; mol_type = other DNA
cctgccccattgtgaggtggcagtg

SEQ ID NO: 16873 - DNA, 25 bp, synthetic construct
  source 1..25: mol_type = other DNA; mol_type = other DNA
cctgccccattgtggagtggcagtg

SEQ ID NO: 16874 - DNA, 25 bp, synthetic construct
  source 1..25: mol_type = other DNA; mol_type = other DNA
cctgccccgttatgaggtggcagtg

SEQ ID NO: 16875 - DNA, 25 bp, synthetic construct
  source 1..25: mol_type = other DNA; mol_type = other DNA
cctgccccgttatggagtggcagtg

SEQ ID NO: 16876 - DNA, 25 bp, synthetic construct
  source 1..25: mol_type = other DNA; mol_type = other DNA
acctgaagggtcggtgggacacact

SEQ ID NO: 16877 - DNA, 25 bp, synthetic construct
  source 1..25: mol_type = other DNA; mol_type = other DNA
acctgaagggtcggtggaacacact

SEQ ID NO: 16878 - DNA, 25 bp, synthetic construct
  source 1..25: mol_type = other DNA; mol_type = other DNA
cacctgaagggtcggtgggacacac

SEQ ID NO: 16879 - DNA, 25 bp, synthetic construct
  source 1..25: mol_type = other DNA; mol_type = other DNA
cacctgaagggtcggtggaacacac

SEQ ID NO: 16880 - DNA, 25 bp, synthetic construct
  source 1..25: mol_type = other DNA; mol_type = other DNA
gcacctgaagggtcggtgggacaca

SEQ ID NO: 16881 - DNA, 25 bp, synthetic construct
  source 1..25: mol_type = other DNA; mol_type = other DNA
gcacctgaagggtcggtggaacaca

SEQ ID NO: 16882 - DNA, 25 bp, synthetic construct
  source 1..25: mol_type = other DNA; mol_type = other DNA
agcacctgaagggtcggtgggacac

SEQ ID NO: 16883 - DNA, 25 bp, synthetic construct
  source 1..25: mol_type = other DNA; mol_type = other DNA
agcacctgaagggtcggtggaacac

SEQ ID NO: 16884 - DNA, 25 bp, synthetic construct
  source 1..25: mol_type = other DNA; mol_type = other DNA
cagcacctgaagggtcggtgggaca

SEQ ID NO: 16885 - DNA, 25 bp, synthetic construct
  source 1..25: mol_type = other DNA; mol_type = other DNA
cagcacctgaagggtcggtggaaca

SEQ ID NO: 16886 - DNA, 25 bp, synthetic construct
  source 1..25: mol_type = other DNA; mol_type = other DNA
gcagcacctgaagggtcggtgggac

SEQ ID NO: 16887 - DNA, 25 bp, synthetic construct
  source 1..25: mol_type = other DNA; mol_type = other DNA
gcagcacctgaagggtcggtggaac

SEQ ID NO: 16888 - DNA, 25 bp, synthetic construct
  source 1..25: mol_type = other DNA; mol_type = other DNA
agcagcacctgaagggtcggtggga

SEQ ID NO: 16889 - DNA, 25 bp, synthetic construct
  source 1..25: mol_type = other DNA; mol_type = other DNA
agcagcacctgaagggtcggtggaa

SEQ ID NO: 16890 - DNA, 25 bp, synthetic construct
  source 1..25: mol_type = other DNA; mol_type = other DNA
gagcagcacctgaagggtcggtggg

SEQ ID NO: 16891 - DNA, 25 bp, synthetic construct
  source 1..25: mol_type = other DNA; mol_type = other DNA
gagcagcacctgaagggtcggtgga

SEQ ID NO: 16892 - DNA, 25 bp, synthetic construct
  source 1..25: mol_type = other DNA; mol_type = other DNA
gagcagcacctgaagggtcggtgaa

SEQ ID NO: 16893 - DNA, 25 bp, synthetic construct
  source 1..25: mol_type = other DNA; mol_type = other DNA
cgagcagcacctgaagggtcggtga

SEQ ID NO: 16894 - DNA, 25 bp, synthetic construct
  source 1..25: mol_type = other DNA; mol_type = other DNA
cgagcagcacctgaagggtcggtaa

SEQ ID NO: 16895 - DNA, 25 bp, synthetic construct
  source 1..25: mol_type = other DNA; mol_type = other DNA
acgagcagcacctgaagggtcggtg

SEQ ID NO: 16896 - DNA, 25 bp, synthetic construct
  source 1..25: mol_type = other DNA; mol_type = other DNA
acgagcagcacctgaagggtcggta

SEQ ID NO: 16897 - DNA, 25 bp, synthetic construct
  source 1..25: mol_type = other DNA; mol_type = other DNA
acgagcagcacctgaagggtcgata

SEQ ID NO: 16898 - DNA, 25 bp, synthetic construct
  source 1..25: mol_type = other DNA; mol_type = other DNA
cacgagcagcacctgaagggtcggt

SEQ ID NO: 16899 - DNA, 25 bp, synthetic construct
  source 1..25: mol_type = other DNA; mol_type = other DNA
cacgagcagcacctgaagggtcgat

SEQ ID NO: 16900 - DNA, 25 bp, synthetic construct
  source 1..25: mol_type = other DNA; mol_type = other DNA
cacgagcagcacctgaagggtcaat

SEQ ID NO: 16901 - DNA, 25 bp, synthetic construct
  source 1..25: mol_type = other DNA; mol_type = other DNA
ccacgagcagcacctgaagggtcga

SEQ ID NO: 16902 - DNA, 25 bp, synthetic construct
  source 1..25: mol_type = other DNA; mol_type = other DNA
ccacgagcagcacctgaagggtcaa

SEQ ID NO: 16903 - DNA, 25 bp, synthetic construct
  source 1..25: mol_type = other DNA; mol_type = other DNA
accacgagcagcacctgaagggtcg

SEQ ID NO: 16904 - DNA, 25 bp, synthetic construct
  source 1..25: mol_type = other DNA; mol_type = other DNA
accacgagcagcacctgaagggtca

SEQ ID NO: 16905 - DNA, 25 bp, synthetic construct
  source 1..25: mol_type = other DNA; mol_type = other DNA
accacgagcagcacctgaaggatca

SEQ ID NO: 16906 - DNA, 25 bp, synthetic construct
  source 1..25: mol_type = other DNA; mol_type = other DNA
caccacgagcagcacctgaagggtc

SEQ ID NO: 16907 - DNA, 25 bp, synthetic construct
  source 1..25: mol_type = other DNA; mol_type = other DNA
caccacgagcagcacctgaaggatc

SEQ ID NO: 16908 - DNA, 25 bp, synthetic construct
  source 1..25: mol_type = other DNA; mol_type = other DNA
caccacgagcagcacctgaagaatc

SEQ ID NO: 16909 - DNA, 25 bp, synthetic construct
  source 1..25: mol_type = other DNA; mol_type = other DNA
ccaccacgagcagcacctgaaggat

SEQ ID NO: 16910 - DNA, 25 bp, synthetic construct
  source 1..25: mol_type = other DNA; mol_type = other DNA
ccaccacgagcagcacctgaagaat

SEQ ID NO: 16911 - DNA, 25 bp, synthetic construct
  source 1..25: mol_type = other DNA; mol_type = other DNA
cccaccacgagcagcacctgaaggg

SEQ ID NO: 16912 - DNA, 25 bp, synthetic construct
  source 1..25: mol_type = other DNA; mol_type = other DNA
cccaccacgagcagcacctgaagga

SEQ ID NO: 16913 - DNA, 25 bp, synthetic construct
  source 1..25: mol_type = other DNA; mol_type = other DNA
cccaccacgagcagcacctgaagaa

SEQ ID NO: 16914 - DNA, 25 bp, synthetic construct
  source 1..25: mol_type = other DNA; mol_type = other DNA
tcccaccacgagcagcacctgaagg

SEQ ID NO: 16915 - DNA, 25 bp, synthetic construct
  source 1..25: mol_type = other DNA; mol_type = other DNA
tcccaccacgagcagcacctgaaga

SEQ ID NO: 16916 - DNA, 25 bp, synthetic construct
  source 1..25: mol_type = other DNA; mol_type = other DNA
tcccaccacgagcagcacctgaaaa

SEQ ID NO: 16917 - DNA, 25 bp, synthetic construct
  source 1..25: mol_type = other DNA; mol_type = other DNA
ctcccaccacgagcagcacctgaaa

SEQ ID NO: 16918 - DNA, 25 bp, synthetic construct
  source 1..25: mol_type = other DNA; mol_type = other DNA
ctcccaccacgagcagcacctaaaa

SEQ ID NO: 16919 - DNA, 25 bp, synthetic construct
  source 1..25: mol_type = other DNA; mol_type = other DNA
cctcccaccacgagcagcacctgaa

SEQ ID NO: 16920 - DNA, 25 bp, synthetic construct
  source 1..25: mol_type = other DNA; mol_type = other DNA
cctcccaccacgagcagcacctaaa

SEQ ID NO: 16921 - DNA, 25 bp, synthetic construct
  source 1..25: mol_type = other DNA; mol_type = other DNA
cctcccaccacgagcaacacctaaa

SEQ ID NO: 16922 - DNA, 25 bp, synthetic construct
  source 1..25: mol_type = other DNA; mol_type = other DNA
ccctcccaccacgagcagcacctga

SEQ ID NO: 16923 - DNA, 25 bp, synthetic construct
  source 1..25: mol_type = other DNA; mol_type = other DNA
ccctcccaccacgagcagcacctaa

SEQ ID NO: 16924 - DNA, 25 bp, synthetic construct
  source 1..25: mol_type = other DNA; mol_type = other DNA
ccctcccaccacgagcaacacctaa

SEQ ID NO: 16925 - DNA, 25 bp, synthetic construct
  source 1..25: mol_type = other DNA; mol_type = other DNA
cccctcccaccacgagcagcaccta

SEQ ID NO: 16926 - DNA, 25 bp, synthetic construct
  source 1..25: mol_type = other DNA; mol_type = other DNA
cccctcccaccacgagcaacaccta

SEQ ID NO: 16927 - DNA, 25 bp, synthetic construct
  source 1..25: mol_type = other DNA; mol_type = other DNA
gcccctcccaccacgagcagcacct

SEQ ID NO: 16928 - DNA, 25 bp, synthetic construct
  source 1..25: mol_type = other DNA; mol_type = other DNA
gcccctcccaccacgagcaacacct

SEQ ID NO: 16929 - DNA, 25 bp, synthetic construct
  source 1..25: mol_type = other DNA; mol_type = other DNA
gcccctcccaccacgaacaacacct

SEQ ID NO: 16930 - DNA, 25 bp, synthetic construct
  source 1..25: mol_type = other DNA; mol_type = other DNA
cgcccctcccaccacgagcagcacc

SEQ ID NO: 16931 - DNA, 25 bp, synthetic construct
  source 1..25: mol_type = other DNA; mol_type = other DNA
cgcccctcccaccacgagcaacacc

SEQ ID NO: 16932 - DNA, 25 bp, synthetic construct
  source 1..25: mol_type = other DNA; mol_type = other DNA
cgcccctcccaccacgaacaacacc

SEQ ID NO: 16933 - DNA, 25 bp, synthetic construct
  source 1..25: mol_type = other DNA; mol_type = other DNA
ccgcccctcccaccacgagcaacac

SEQ ID NO: 16934 - DNA, 25 bp, synthetic construct
  source 1..25: mol_type = other DNA; mol_type = other DNA
ccgcccctcccaccacgaacaacac

SEQ ID NO: 16935 - DNA, 25 bp, synthetic construct
  source 1..25: mol_type = other DNA; mol_type = other DNA
gccgcccctcccaccacgagcagca

SEQ ID NO: 16936 - DNA, 25 bp, synthetic construct
  source 1..25: mol_type = other DNA; mol_type = other DNA
gccgcccctcccaccacgagcaaca

SEQ ID NO: 16937 - DNA, 25 bp, synthetic construct
  source 1..25: mol_type = other DNA; mol_type = other DNA
gccgcccctcccaccacgaacaaca

SEQ ID NO: 16938 - DNA, 25 bp, synthetic construct
  source 1..25: mol_type = other DNA; mol_type = other DNA
tgccgcccctcccaccacgagcagc

SEQ ID NO: 16939 - DNA, 25 bp, synthetic construct
  source 1..25: mol_type = other DNA; mol_type = other DNA
tgccgcccctcccaccacgagcaac

SEQ ID NO: 16940 - DNA, 25 bp, synthetic construct
  source 1..25: mol_type = other DNA; mol_type = other DNA
tgccgcccctcccaccacgaacaac

SEQ ID NO: 16941 - DNA, 25 bp, synthetic construct
  source 1..25: mol_type = other DNA; mol_type = other DNA
ctgccgcccctcccaccacgagcaa

SEQ ID NO: 16942 - DNA, 25 bp, synthetic construct
  source 1..25: mol_type = other DNA; mol_type = other DNA
ctgccgcccctcccaccacgaacaa

SEQ ID NO: 16943 - DNA, 25 bp, synthetic construct
  source 1..25: mol_type = other DNA; mol_type = other DNA
cctgccgcccctcccaccacgagca

SEQ ID NO: 16944 - DNA, 25 bp, synthetic construct
  source 1..25: mol_type = other DNA; mol_type = other DNA
cctgccgcccctcccaccacgaaca

SEQ ID NO: 16945 - DNA, 25 bp, synthetic construct
  source 1..25: mol_type = other DNA; mol_type = other DNA
cctgccgcccctcccaccacaaaca

SEQ ID NO: 16946 - DNA, 25 bp, synthetic construct
  source 1..25: mol_type = other DNA; mol_type = other DNA
gcctgccgcccctcccaccacgagc

SEQ ID NO: 16947 - DNA, 25 bp, synthetic construct
  source 1..25: mol_type = other DNA; mol_type = other DNA
gcctgccgcccctcccaccacgaac

SEQ ID NO: 16948 - DNA, 25 bp, synthetic construct
  source 1..25: mol_type = other DNA; mol_type = other DNA
gcctgccgcccctcccaccacaaac

SEQ ID NO: 16949 - DNA, 25 bp, synthetic construct
  source 1..25: mol_type = other DNA; mol_type = other DNA
ggcctgccgcccctcccaccacgaa

SEQ ID NO: 16950 - DNA, 25 bp, synthetic construct
  source 1..25: mol_type = other DNA; mol_type = other DNA
ggcctgccgcccctcccaccacaaa

SEQ ID NO: 16951 - DNA, 25 bp, synthetic construct
  source 1..25: mol_type = other DNA; mol_type = other DNA
cggcctgccgcccctcccaccacga

SEQ ID NO: 16952 - DNA, 25 bp, synthetic construct
  source 1..25: mol_type = other DNA; mol_type = other DNA
cggcctgccgcccctcccaccacaa

SEQ ID NO: 16953 - DNA, 25 bp, synthetic construct
  source 1..25: mol_type = other DNA; mol_type = other DNA
cggcctgccacccctcccaccacaa

SEQ ID NO: 16954 - DNA, 25 bp, synthetic construct
  source 1..25: mol_type = other DNA; mol_type = other DNA
gggagagaccctgtgaggaagatgg

SEQ ID NO: 16955 - DNA, 25 bp, synthetic construct
  source 1..25: mol_type = other DNA; mol_type = other DNA
gggagagaccctgtgaggaagatga

SEQ ID NO: 16956 - DNA, 25 bp, synthetic construct
  source 1..25: mol_type = other DNA; mol_type = other DNA
gggagagaccctgtgaggaagataa

SEQ ID NO: 16957 - DNA, 25 bp, synthetic construct
  source 1..25: mol_type = other DNA; mol_type = other DNA
tgggagagaccctgtgaggaagatg

SEQ ID NO: 16958 - DNA, 25 bp, synthetic construct
  source 1..25: mol_type = other DNA; mol_type = other DNA
gtggagagaccctgtgaggaagatg

SEQ ID NO: 16959 - DNA, 25 bp, synthetic construct
  source 1..25: mol_type = other DNA; mol_type = other DNA
ggtgagagaccctgtgaggaagatg

SEQ ID NO: 16960 - DNA, 25 bp, synthetic construct
  source 1..25: mol_type = other DNA; mol_type = other DNA
gggtagagaccctgtgaggaagatg

SEQ ID NO: 16961 - DNA, 25 bp, synthetic construct
  source 1..25: mol_type = other DNA; mol_type = other DNA
ttgggagagaccctgtgaggaagat

SEQ ID NO: 16962 - DNA, 25 bp, synthetic construct
  source 1..25: mol_type = other DNA; mol_type = other DNA
tgtggagagaccctgtgaggaagat

SEQ ID NO: 16963 - DNA, 25 bp, synthetic construct
  source 1..25: mol_type = other DNA; mol_type = other DNA
tggtgagagaccctgtgaggaagat

SEQ ID NO: 16964 - DNA, 25 bp, synthetic construct
  source 1..25: mol_type = other DNA; mol_type = other DNA
tgggtagagaccctgtgaggaagat

SEQ ID NO: 16965 - DNA, 25 bp, synthetic construct
  source 1..25: mol_type = other DNA; mol_type = other DNA
tttgggagagaccctgtgaggaaga

SEQ ID NO: 16966 - DNA, 25 bp, synthetic construct
  source 1..25: mol_type = other DNA; mol_type = other DNA
ttgtggagagaccctgtgaggaaga

SEQ ID NO: 16967 - DNA, 25 bp, synthetic construct
  source 1..25: mol_type = other DNA; mol_type = other DNA
ttggtgagagaccctgtgaggaaga

SEQ ID NO: 16968 - DNA, 25 bp, synthetic construct
  source 1..25: mol_type = other DNA; mol_type = other DNA
ttgggtagagaccctgtgaggaaga

SEQ ID NO: 16969 - DNA, 25 bp, synthetic construct
  source 1..25: mol_type = other DNA; mol_type = other DNA
ctttgggagagaccctgtgaggaag

SEQ ID NO: 16970 - DNA, 25 bp, synthetic construct
  source 1..25: mol_type = other DNA; mol_type = other DNA
cttgtggagagaccctgtgaggaag

SEQ ID NO: 16971 - DNA, 25 bp, synthetic construct
  source 1..25: mol_type = other DNA; mol_type = other DNA
cttggtgagagaccctgtgaggaag

SEQ ID NO: 16972 - DNA, 25 bp, synthetic construct
  source 1..25: mol_type = other DNA; mol_type = other DNA
cttgggtagagaccctgtgaggaag

SEQ ID NO: 16973 - DNA, 25 bp, synthetic construct
  source 1..25: mol_type = other DNA; mol_type = other DNA
cctttgggagagaccctgtgaggaa

SEQ ID NO: 16974 - DNA, 25 bp, synthetic construct
  source 1..25: mol_type = other DNA; mol_type = other DNA
ccttgtggagagaccctgtgaggaa

SEQ ID NO: 16975 - DNA, 25 bp, synthetic construct
  source 1..25: mol_type = other DNA; mol_type = other DNA
ccttggtgagagaccctgtgaggaa

SEQ ID NO: 16976 - DNA, 25 bp, synthetic construct
  source 1..25: mol_type = other DNA; mol_type = other DNA
ccttgggtagagaccctgtgaggaa

SEQ ID NO: 16977 - DNA, 25 bp, synthetic construct
  source 1..25: mol_type = other DNA; mol_type = other DNA
tccttagggagagaccctgtgagga

SEQ ID NO: 16978 - DNA, 25 bp, synthetic construct
  source 1..25: mol_type = other DNA; mol_type = other DNA
tccttgaggagagaccctgtgagga

SEQ ID NO: 16979 - DNA, 25 bp, synthetic construct
  source 1..25: mol_type = other DNA; mol_type = other DNA
tccttggagagagaccctgtgagga

SEQ ID NO: 16980 - DNA, 25 bp, synthetic construct
  source 1..25: mol_type = other DNA; mol_type = other DNA
tccttgggaagagaccctgtgagga

SEQ ID NO: 16981 - DNA, 25 bp, synthetic construct
  source 1..25: mol_type = other DNA; mol_type = other DNA
ctccttagggagagaccctgtgagg

SEQ ID NO: 16982 - DNA, 25 bp, synthetic construct
  source 1..25: mol_type = other DNA; mol_type = other DNA
ctccttgaggagagaccctgtgagg

SEQ ID NO: 16983 - DNA, 25 bp, synthetic construct
  source 1..25: mol_type = other DNA; mol_type = other DNA
ctccttggagagagaccctgtgagg

SEQ ID NO: 16984 - DNA, 25 bp, synthetic construct
  source 1..25: mol_type = other DNA; mol_type = other DNA
ctccttgggaagagaccctgtgagg

SEQ ID NO: 16985 - DNA, 25 bp, synthetic construct
  source 1..25: mol_type = other DNA; mol_type = other DNA
cctccttagggagagaccctgtgag

SEQ ID NO: 16986 - DNA, 25 bp, synthetic construct
  source 1..25: mol_type = other DNA; mol_type = other DNA
cctccttgaggagagaccctgtgag

SEQ ID NO: 16987 - DNA, 25 bp, synthetic construct
  source 1..25: mol_type = other DNA; mol_type = other DNA
cctccttggagagagaccctgtgag

SEQ ID NO: 16988 - DNA, 25 bp, synthetic construct
  source 1..25: mol_type = other DNA; mol_type = other DNA
cctccttgggaagagaccctgtgag

SEQ ID NO: 16989 - DNA, 25 bp, synthetic construct
  source 1..25: mol_type = other DNA; mol_type = other DNA
ccctccttagggagagaccctgtga

SEQ ID NO: 16990 - DNA, 25 bp, synthetic construct
  source 1..25: mol_type = other DNA; mol_type = other DNA
ccctccttgaggagagaccctgtga

SEQ ID NO: 16991 - DNA, 25 bp, synthetic construct
  source 1..25: mol_type = other DNA; mol_type = other DNA
ccctccttggagagagaccctgtga

SEQ ID NO: 16992 - DNA, 25 bp, synthetic construct
  source 1..25: mol_type = other DNA; mol_type = other DNA
ccctccttgggaagagaccctgtga

SEQ ID NO: 16993 - DNA, 25 bp, synthetic construct
  source 1..25: mol_type = other DNA; mol_type = other DNA
cccctccttagggagagaccctgtg

SEQ ID NO: 16994 - DNA, 25 bp, synthetic construct
  source 1..25: mol_type = other DNA; mol_type = other DNA
cccctccttgaggagagaccctgtg

SEQ ID NO: 16995 - DNA, 25 bp, synthetic construct
  source 1..25: mol_type = other DNA; mol_type = other DNA
cccctccttggagagagaccctgtg

SEQ ID NO: 16996 - DNA, 25 bp, synthetic construct
  source 1..25: mol_type = other DNA; mol_type = other DNA
cccctccttgggaagagaccctgtg

SEQ ID NO: 16997 - DNA, 25 bp, synthetic construct
  source 1..25: mol_type = other DNA; mol_type = other DNA
ccccctccttagggagagaccctgt

SEQ ID NO: 16998 - DNA, 25 bp, synthetic construct
  source 1..25: mol_type = other DNA; mol_type = other DNA
ccccctccttgaggagagaccctgt

SEQ ID NO: 16999 - DNA, 25 bp, synthetic construct
  source 1..25: mol_type = other DNA; mol_type = other DNA
ccccctccttggagagagaccctgt

SEQ ID NO: 17000 - DNA, 25 bp, synthetic construct
  source 1..25: mol_type = other DNA; mol_type = other DNA
ccccctccttgggaagagaccctgt

SEQ ID NO: 17001 - DNA, 25 bp, synthetic construct
  source 1..25: mol_type = other DNA; mol_type = other DNA
gccccctccttagggagagaccctg

SEQ ID NO: 17002 - DNA, 25 bp, synthetic construct
  source 1..25: mol_type = other DNA; mol_type = other DNA
gccccctccttgaggagagaccctg

SEQ ID NO: 17003 - DNA, 25 bp, synthetic construct
  source 1..25: mol_type = other DNA; mol_type = other DNA
gccccctccttggagagagaccctg

SEQ ID NO: 17004 - DNA, 25 bp, synthetic construct
  source 1..25: mol_type = other DNA; mol_type = other DNA
gccccctccttgggaagagaccctg

SEQ ID NO: 17005 - DNA, 25 bp, synthetic construct
  source 1..25: mol_type = other DNA; mol_type = other DNA
agccccctccttagggagagaccct

SEQ ID NO: 17006 - DNA, 25 bp, synthetic construct
  source 1..25: mol_type = other DNA; mol_type = other DNA
agccccctccttgaggagagaccct

SEQ ID NO: 17007 - DNA, 25 bp, synthetic construct
  source 1..25: mol_type = other DNA; mol_type = other DNA
agccccctccttggagagagaccct

SEQ ID NO: 17008 - DNA, 25 bp, synthetic construct
  source 1..25: mol_type = other DNA; mol_type = other DNA
agccccctccttgggaagagaccct

SEQ ID NO: 17009 - DNA, 25 bp, synthetic construct
  source 1..25: mol_type = other DNA; mol_type = other DNA
tagccccctccttagggagagaccc

SEQ ID NO: 17010 - DNA, 25 bp, synthetic construct
  source 1..25: mol_type = other DNA; mol_type = other DNA
tagccccctccttgaggagagaccc

SEQ ID NO: 17011 - DNA, 25 bp, synthetic construct
  source 1..25: mol_type = other DNA; mol_type = other DNA
tagccccctccttggagagagaccc

SEQ ID NO: 17012 - DNA, 25 bp, synthetic construct
  source 1..25: mol_type = other DNA; mol_type = other DNA
tagccccctccttgggaagagaccc

SEQ ID NO: 17013 - DNA, 25 bp, synthetic construct
  source 1..25: mol_type = other DNA; mol_type = other DNA
ctagccccctccttagggagagacc

SEQ ID NO: 17014 - DNA, 25 bp, synthetic construct
  source 1..25: mol_type = other DNA; mol_type = other DNA
ctagccccctccttgaggagagacc

SEQ ID NO: 17015 - DNA, 25 bp, synthetic construct
  source 1..25: mol_type = other DNA; mol_type = other DNA
ctagccccctccttggagagagacc

SEQ ID NO: 17016 - DNA, 25 bp, synthetic construct
  source 1..25: mol_type = other DNA; mol_type = other DNA
ctagccccctccttgggaagagacc

SEQ ID NO: 17017 - DNA, 25 bp, synthetic construct
  source 1..25: mol_type = other DNA; mol_type = other DNA
gctagccccctccttagggagagac

SEQ ID NO: 17018 - DNA, 25 bp, synthetic construct
  source 1..25: mol_type = other DNA; mol_type = other DNA
gctagccccctccttgaggagagac

SEQ ID NO: 17019 - DNA, 25 bp, synthetic construct
  source 1..25: mol_type = other DNA; mol_type = other DNA
gctagccccctccttggagagagac

SEQ ID NO: 17020 - DNA, 25 bp, synthetic construct
  source 1..25: mol_type = other DNA; mol_type = other DNA
gctagccccctccttgggaagagac

SEQ ID NO: 17021 - DNA, 25 bp, synthetic construct
  source 1..25: mol_type = other DNA; mol_type = other DNA
agctagccccctcctttgggagaga

SEQ ID NO: 17022 - DNA, 25 bp, synthetic construct
  source 1..25: mol_type = other DNA; mol_type = other DNA
agctagccccctccttgtggagaga

SEQ ID NO: 17023 - DNA, 25 bp, synthetic construct
  source 1..25: mol_type = other DNA; mol_type = other DNA
agctagccccctccttggtgagaga

SEQ ID NO: 17024 - DNA, 25 bp, synthetic construct
  source 1..25: mol_type = other DNA; mol_type = other DNA
agctagccccctccttgggtagaga

SEQ ID NO: 17025 - DNA, 25 bp, synthetic construct
  source 1..25: mol_type = other DNA; mol_type = other DNA
aagctagccccctcctttgggagag

SEQ ID NO: 17026 - DNA, 25 bp, synthetic construct
  source 1..25: mol_type = other DNA; mol_type = other DNA
aagctagccccctccttgtggagag

SEQ ID NO: 17027 - DNA, 25 bp, synthetic construct
  source 1..25: mol_type = other DNA; mol_type = other DNA
aagctagccccctccttggtgagag

SEQ ID NO: 17028 - DNA, 25 bp, synthetic construct
  source 1..25: mol_type = other DNA; mol_type = other DNA
aagctagccccctccttgggtagag

SEQ ID NO: 17029 - DNA, 25 bp, synthetic construct
  source 1..25: mol_type = other DNA; mol_type = other DNA
caagctagccccctcctttgggaga

SEQ ID NO: 17030 - DNA, 25 bp, synthetic construct
  source 1..25: mol_type = other DNA; mol_type = other DNA
caagctagccccctccttgtggaga

SEQ ID NO: 17031 - DNA, 25 bp, synthetic construct
  source 1..25: mol_type = other DNA; mol_type = other DNA
caagctagccccctccttggtgaga

SEQ ID NO: 17032 - DNA, 25 bp, synthetic construct
  source 1..25: mol_type = other DNA; mol_type = other DNA
caagctagccccctccttgggtaga

SEQ ID NO: 17033 - DNA, 25 bp, synthetic construct
  source 1..25: mol_type = other DNA; mol_type = other DNA
ccaagctagccccctccttagggag

SEQ ID NO: 17034 - DNA, 25 bp, synthetic construct
  source 1..25: mol_type = other DNA; mol_type = other DNA
ccaagctagccccctccttgaggag

SEQ ID NO: 17035 - DNA, 25 bp, synthetic construct
  source 1..25: mol_type = other DNA; mol_type = other DNA
ccaagctagccccctccttggagag

SEQ ID NO: 17036 - DNA, 25 bp, synthetic construct
  source 1..25: mol_type = other DNA; mol_type = other DNA
ccaagctagccccctccttgggaag

SEQ ID NO: 17037 - DNA, 25 bp, synthetic construct
  source 1..25: mol_type = other DNA; mol_type = other DNA
aaggagagaccctgtgaggaagatg

SEQ ID NO: 17038 - DNA, 25 bp, synthetic construct
  source 1..25: mol_type = other DNA; mol_type = other DNA
agagagagaccctgtgaggaagatg

SEQ ID NO: 17039 - DNA, 25 bp, synthetic construct
  source 1..25: mol_type = other DNA; mol_type = other DNA
gaggaaagaccctgtgaggaagatg

SEQ ID NO: 17040 - DNA, 25 bp, synthetic construct
  source 1..25: mol_type = other DNA; mol_type = other DNA
gaggagaaaccctgtgaggaagatg

SEQ ID NO: 17041 - DNA, 25 bp, synthetic construct
  source 1..25: mol_type = other DNA; mol_type = other DNA
gaggagagaccctgtgaggaaaatg

SEQ ID NO: 17042 - DNA, 25 bp, synthetic construct
  source 1..25: mol_type = other DNA; mol_type = other DNA
gaggagagaccctgtgaggaagata

SEQ ID NO: 17043 - DNA, 25 bp, synthetic construct
  source 1..25: mol_type = other DNA; mol_type = other DNA
taaggagagaccctgtgaggaagat

SEQ ID NO: 17044 - DNA, 25 bp, synthetic construct
  source 1..25: mol_type = other DNA; mol_type = other DNA
tagagagagaccctgtgaggaagat

SEQ ID NO: 17045 - DNA, 25 bp, synthetic construct
  source 1..25: mol_type = other DNA; mol_type = other DNA
tgaggaaagaccctgtgaggaagat

SEQ ID NO: 17046 - DNA, 25 bp, synthetic construct
  source 1..25: mol_type = other DNA; mol_type = other DNA
tgaggagaaaccctgtgaggaagat

SEQ ID NO: 17047 - DNA, 25 bp, synthetic construct
  source 1..25: mol_type = other DNA; mol_type = other DNA
tgaggagagaccctgtgagaaagat

SEQ ID NO: 17048 - DNA, 25 bp, synthetic construct
  source 1..25: mol_type = other DNA; mol_type = other DNA
tgaggagagaccctgtgaggaaaat

SEQ ID NO: 17049 - DNA, 25 bp, synthetic construct
  source 1..25: mol_type = other DNA; mol_type = other DNA
ttaaggagagaccctgtgaggaaga

SEQ ID NO: 17050 - DNA, 25 bp, synthetic construct
  source 1..25: mol_type = other DNA; mol_type = other DNA
ttagagagagaccctgtgaggaaga

SEQ ID NO: 17051 - DNA, 25 bp, synthetic construct
  source 1..25: mol_type = other DNA; mol_type = other DNA
ttgaggaaagaccctgtgaggaaga

SEQ ID NO: 17052 - DNA, 25 bp, synthetic construct
  source 1..25: mol_type = other DNA; mol_type = other DNA
ttgaggagaaaccctgtgaggaaga

SEQ ID NO: 17053 - DNA, 25 bp, synthetic construct
  source 1..25: mol_type = other DNA; mol_type = other DNA
ttgaggagagaccctgtgagaaaga

SEQ ID NO: 17054 - DNA, 25 bp, synthetic construct
  source 1..25: mol_type = other DNA; mol_type = other DNA
ttgaggagagaccctgtgaggaaaa

SEQ ID NO: 17055 - DNA, 25 bp, synthetic construct
  source 1..25: mol_type = other DNA; mol_type = other DNA
cttaaggagagaccctgtgaggaag

SEQ ID NO: 17056 - DNA, 25 bp, synthetic construct
  source 1..25: mol_type = other DNA; mol_type = other DNA
cttagagagagaccctgtgaggaag

SEQ ID NO: 17057 - DNA, 25 bp, synthetic construct
  source 1..25: mol_type = other DNA; mol_type = other DNA
cttgaggaaagaccctgtgaggaag

SEQ ID NO: 17058 - DNA, 25 bp, synthetic construct
  source 1..25: mol_type = other DNA; mol_type = other DNA
cttgaggagaaaccctgtgaggaag

SEQ ID NO: 17059 - DNA, 25 bp, synthetic construct
  source 1..25: mol_type = other DNA; mol_type = other DNA
cttgaggagagaccctgtgagaaag

SEQ ID NO: 17060 - DNA, 25 bp, synthetic construct
  source 1..25: mol_type = other DNA; mol_type = other DNA
cttgaggagagaccctgtgaggaaa

SEQ ID NO: 17061 - DNA, 25 bp, synthetic construct
  source 1..25: mol_type = other DNA; mol_type = other DNA
ccttaaggagagaccctgtgaggaa

SEQ ID NO: 17062 - DNA, 25 bp, synthetic construct
  source 1..25: mol_type = other DNA; mol_type = other DNA
ccttagagagagaccctgtgaggaa

SEQ ID NO: 17063 - DNA, 25 bp, synthetic construct
  source 1..25: mol_type = other DNA; mol_type = other DNA
ccttgaggaaagaccctgtgaggaa

SEQ ID NO: 17064 - DNA, 25 bp, synthetic construct
  source 1..25: mol_type = other DNA; mol_type = other DNA
ccttgaggagaaaccctgtgaggaa

SEQ ID NO: 17065 - DNA, 25 bp, synthetic construct
  source 1..25: mol_type = other DNA; mol_type = other DNA
ccttgaggagagaccctgtgaagaa

SEQ ID NO: 17066 - DNA, 25 bp, synthetic construct
  source 1..25: mol_type = other DNA; mol_type = other DNA
ccttgaggagagaccctgtgagaaa

SEQ ID NO: 17067 - DNA, 25 bp, synthetic construct
  source 1..25: mol_type = other DNA; mol_type = other DNA
tccttaaggagagaccctgtgagga

SEQ ID NO: 17068 - DNA, 25 bp, synthetic construct
  source 1..25: mol_type = other DNA; mol_type = other DNA
tccttagagagagaccctgtgagga

SEQ ID NO: 17069 - DNA, 25 bp, synthetic construct
  source 1..25: mol_type = other DNA; mol_type = other DNA
tccttgaggaaagaccctgtgagga

SEQ ID NO: 17070 - DNA, 25 bp, synthetic construct
  source 1..25: mol_type = other DNA; mol_type = other DNA
tccttgaggagaaaccctgtgagga

SEQ ID NO: 17071 - DNA, 25 bp, synthetic construct
  source 1..25: mol_type = other DNA; mol_type = other DNA
tccttgaggagagaccctgtgaaga

SEQ ID NO: 17072 - DNA, 25 bp, synthetic construct
  source 1..25: mol_type = other DNA; mol_type = other DNA
tccttgaggagagaccctgtgagaa

SEQ ID NO: 17073 - DNA, 25 bp, synthetic construct
  source 1..25: mol_type = other DNA; mol_type = other DNA
ctccttaaggagagaccctgtgagg

SEQ ID NO: 17074 - DNA, 25 bp, synthetic construct
  source 1..25: mol_type = other DNA; mol_type = other DNA
ctccttagagagagaccctgtgagg

SEQ ID NO: 17075 - DNA, 25 bp, synthetic construct
  source 1..25: mol_type = other DNA; mol_type = other DNA
ctccttgaggaaagaccctgtgagg

SEQ ID NO: 17076 - DNA, 25 bp, synthetic construct
  source 1..25: mol_type = other DNA; mol_type = other DNA
ctccttgaggagaaaccctgtgagg

SEQ ID NO: 17077 - DNA, 25 bp, synthetic construct
  source 1..25: mol_type = other DNA; mol_type = other DNA
ctccttgaggagagaccctgtgaag

SEQ ID NO: 17078 - DNA, 25 bp, synthetic construct
  source 1..25: mol_type = other DNA; mol_type = other DNA
ctccttgaggagagaccctgtgaga

SEQ ID NO: 17079 - DNA, 25 bp, synthetic construct
  source 1..25: mol_type = other DNA; mol_type = other DNA
cctccttaaggagagaccctgtgag

SEQ ID NO: 17080 - DNA, 25 bp, synthetic construct
  source 1..25: mol_type = other DNA; mol_type = other DNA
cctccttagagagagaccctgtgag

SEQ ID NO: 17081 - DNA, 25 bp, synthetic construct
  source 1..25: mol_type = other DNA; mol_type = other DNA
cctccttgaggaaagaccctgtgag

SEQ ID NO: 17082 - DNA, 25 bp, synthetic construct
  source 1..25: mol_type = other DNA; mol_type = other DNA
cctccttgaggagaaaccctgtgag

SEQ ID NO: 17083 - DNA, 25 bp, synthetic construct
  source 1..25: mol_type = other DNA; mol_type = other DNA
cctccttgaggagagaccctgtaag

SEQ ID NO: 17084 - DNA, 25 bp, synthetic construct
  source 1..25: mol_type = other DNA; mol_type = other DNA
cctccttgaggagagaccctgtgaa

SEQ ID NO: 17085 - DNA, 25 bp, synthetic construct
  source 1..25: mol_type = other DNA; mol_type = other DNA
ccctccttaaggagagaccctgtga

SEQ ID NO: 17086 - DNA, 25 bp, synthetic construct
  source 1..25: mol_type = other DNA; mol_type = other DNA
ccctccttagagagagaccctgtga

SEQ ID NO: 17087 - DNA, 25 bp, synthetic construct
  source 1..25: mol_type = other DNA; mol_type = other DNA
ccctccttgaggaaagaccctgtga

SEQ ID NO: 17088 - DNA, 25 bp, synthetic construct
  source 1..25: mol_type = other DNA; mol_type = other DNA
ccctccttgaggagaaaccctgtga

SEQ ID NO: 17089 - DNA, 25 bp, synthetic construct
  source 1..25: mol_type = other DNA; mol_type = other DNA
ccctccttgaggagagaccctatga

SEQ ID NO: 17090 - DNA, 25 bp, synthetic construct
  source 1..25: mol_type = other DNA; mol_type = other DNA
ccctccttgaggagagaccctgtaa

SEQ ID NO: 17091 - DNA, 25 bp, synthetic construct
  source 1..25: mol_type = other DNA; mol_type = other DNA
cccctccttaaggagagaccctgtg

SEQ ID NO: 17092 - DNA, 25 bp, synthetic construct
  source 1..25: mol_type = other DNA; mol_type = other DNA
cccctccttagagagagaccctgtg

SEQ ID NO: 17093 - DNA, 25 bp, synthetic construct
  source 1..25: mol_type = other DNA; mol_type = other DNA
cccctccttgaggaaagaccctgtg

SEQ ID NO: 17094 - DNA, 25 bp, synthetic construct
  source 1..25: mol_type = other DNA; mol_type = other DNA
cccctccttgaggagaaaccctgtg

SEQ ID NO: 17095 - DNA, 25 bp, synthetic construct
  source 1..25: mol_type = other DNA; mol_type = other DNA
cccctccttgaggagagaccctatg

SEQ ID NO: 17096 - DNA, 25 bp, synthetic construct
  source 1..25: mol_type = other DNA; mol_type = other DNA
cccctccttgaggagagaccctgta

SEQ ID NO: 17097 - DNA, 25 bp, synthetic construct
  source 1..25: mol_type = other DNA; mol_type = other DNA
ccccctccttaaggagagaccctgt

SEQ ID NO: 17098 - DNA, 25 bp, synthetic construct
  source 1..25: mol_type = other DNA; mol_type = other DNA
ccccctccttagagagagaccctgt

SEQ ID NO: 17099 - DNA, 25 bp, synthetic construct
  source 1..25: mol_type = other DNA; mol_type = other DNA
ccccctccttgaggaaagaccctgt

SEQ ID NO: 17100 - DNA, 25 bp, synthetic construct
  source 1..25: mol_type = other DNA; mol_type = other DNA
ccccctccttgaggagaaaccctgt

SEQ ID NO: 17101 - DNA, 25 bp, synthetic construct
  source 1..25: mol_type = other DNA; mol_type = other DNA
ccccctccttgaggagagaccctat

SEQ ID NO: 17102 - DNA, 25 bp, synthetic construct
  source 1..25: mol_type = other DNA; mol_type = other DNA
ccccctccttggaaagagaccctgt

SEQ ID NO: 17103 - DNA, 25 bp, synthetic construct
  source 1..25: mol_type = other DNA; mol_type = other DNA
accccctccttgaggagagaccctg

SEQ ID NO: 17104 - DNA, 25 bp, synthetic construct
  source 1..25: mol_type = other DNA; mol_type = other DNA
accccctccttggagagagaccctg

SEQ ID NO: 17105 - DNA, 25 bp, synthetic construct
  source 1..25: mol_type = other DNA; mol_type = other DNA
gccccctccttgaggagaaaccctg

SEQ ID NO: 17106 - DNA, 25 bp, synthetic construct
  source 1..25: mol_type = other DNA; mol_type = other DNA
gccccctccttgaggagagacccta

SEQ ID NO: 17107 - DNA, 25 bp, synthetic construct
  source 1..25: mol_type = other DNA; mol_type = other DNA
aaccccctccttgaggagagaccct

SEQ ID NO: 17108 - DNA, 25 bp, synthetic construct
  source 1..25: mol_type = other DNA; mol_type = other DNA
aaccccctccttggagagagaccct

SEQ ID NO: 17109 - DNA, 25 bp, synthetic construct
  source 1..25: mol_type = other DNA; mol_type = other DNA
agccccctccttgaggaaagaccct

SEQ ID NO: 17110 - DNA, 25 bp, synthetic construct
  source 1..25: mol_type = other DNA; mol_type = other DNA
agccccctccttgaggagaaaccct

SEQ ID NO: 17111 - DNA, 25 bp, synthetic construct
  source 1..25: mol_type = other DNA; mol_type = other DNA
taaccccctccttgaggagagaccc

SEQ ID NO: 17112 - DNA, 25 bp, synthetic construct
  source 1..25: mol_type = other DNA; mol_type = other DNA
tagccccctccttaggaagagaccc

SEQ ID NO: 17113 - DNA, 25 bp, synthetic construct
  source 1..25: mol_type = other DNA; mol_type = other DNA
tagccccctccttgaggagaaaccc

SEQ ID NO: 17114 - DNA, 25 bp, synthetic construct
  source 1..25: mol_type = other DNA; mol_type = other DNA
tagccccctccttggaaagagaccc

SEQ ID NO: 17115 - DNA, 25 bp, synthetic construct
  source 1..25: mol_type = other DNA; mol_type = other DNA
ctaaccccctccttgaggagagacc

SEQ ID NO: 17116 - DNA, 25 bp, synthetic construct
  source 1..25: mol_type = other DNA; mol_type = other DNA
ctagccccctccttaggaagagacc

SEQ ID NO: 17117 - DNA, 25 bp, synthetic construct
  source 1..25: mol_type = other DNA; mol_type = other DNA
ctagccccctccttgaggaaagacc

SEQ ID NO: 17118 - DNA, 25 bp, synthetic construct
  source 1..25: mol_type = other DNA; mol_type = other DNA
ctagccccctccttgaggagaaacc

SEQ ID NO: 17119 - DNA, 25 bp, synthetic construct
  source 1..25: mol_type = other DNA; mol_type = other DNA
actagccccctccttggagagagac

SEQ ID NO: 17120 - DNA, 25 bp, synthetic construct
  source 1..25: mol_type = other DNA; mol_type = other DNA
gctagccccctccttagagagagac

SEQ ID NO: 17121 - DNA, 25 bp, synthetic construct
  source 1..25: mol_type = other DNA; mol_type = other DNA
gctagccccctccttgaggaaagac

SEQ ID NO: 17122 - DNA, 25 bp, synthetic construct
  source 1..25: mol_type = other DNA; mol_type = other DNA
gctagccccctccttgaggagaaac

SEQ ID NO: 17123 - DNA, 25 bp, synthetic construct
  source 1..25: mol_type = other DNA; mol_type = other DNA
aactagccccctccttggagagaga

SEQ ID NO: 17124 - DNA, 25 bp, synthetic construct
  source 1..25: mol_type = other DNA; mol_type = other DNA
agctagccccctccttaggaagaga

SEQ ID NO: 17125 - DNA, 25 bp, synthetic construct
  source 1..25: mol_type = other DNA; mol_type = other DNA
agctagccccctccttgaggaaaga

SEQ ID NO: 17126 - DNA, 25 bp, synthetic construct
  source 1..25: mol_type = other DNA; mol_type = other DNA
agctagccccctccttgaggagaaa

SEQ ID NO: 17127 - DNA, 25 bp, synthetic construct
  source 1..25: mol_type = other DNA; mol_type = other DNA
aaactagccccctccttgaggagag

SEQ ID NO: 17128 - DNA, 25 bp, synthetic construct
  source 1..25: mol_type = other DNA; mol_type = other DNA
aagctaaccccctccttggagagag

SEQ ID NO: 17129 - DNA, 25 bp, synthetic construct
  source 1..25: mol_type = other DNA; mol_type = other DNA
aagctagccccctccttgaggaaag

SEQ ID NO: 17130 - DNA, 25 bp, synthetic construct
  source 1..25: mol_type = other DNA; mol_type = other DNA
aagctagccccctccttgaggagaa

SEQ ID NO: 17131 - DNA, 25 bp, synthetic construct
  source 1..25: mol_type = other DNA; mol_type = other DNA
caaactagccccctccttgaggaga

SEQ ID NO: 17132 - DNA, 25 bp, synthetic construct
  source 1..25: mol_type = other DNA; mol_type = other DNA
caagctaaccccctccttggagaga

SEQ ID NO: 17133 - DNA, 25 bp, synthetic construct
  source 1..25: mol_type = other DNA; mol_type = other DNA
caagctagccccctccttaggaaga

SEQ ID NO: 17134 - DNA, 25 bp, synthetic construct
  source 1..25: mol_type = other DNA; mol_type = other DNA
caagctagccccctccttgaggaaa

SEQ ID NO: 17135 - DNA, 25 bp, synthetic construct
  source 1..25: mol_type = other DNA; mol_type = other DNA
ccaaactagccccctccttgaggag

SEQ ID NO: 17136 - DNA, 25 bp, synthetic construct
  source 1..25: mol_type = other DNA; mol_type = other DNA
ccaagctaaccccctccttggagag

SEQ ID NO: 17137 - DNA, 25 bp, synthetic construct
  source 1..25: mol_type = other DNA; mol_type = other DNA
ccaagctagccccctccttaggaag

SEQ ID NO: 17138 - DNA, 25 bp, synthetic construct
  source 1..25: mol_type = other DNA; mol_type = other DNA
ccaagctagccccctccttgaggaa

SEQ ID NO: 17139 - DNA, 25 bp, synthetic construct
  source 1..25: mol_type = other DNA; mol_type = other DNA
accaagctagccccctccttgggaa

SEQ ID NO: 17140 - DNA, 25 bp, synthetic construct
  source 1..25: mol_type = other DNA; mol_type = other DNA
accaagctagccccctccttggaaa

SEQ ID NO: 17141 - DNA, 25 bp, synthetic construct
  source 1..25: mol_type = other DNA; mol_type = other DNA
gaccaagctagccccctccttggga

SEQ ID NO: 17142 - DNA, 25 bp, synthetic construct
  source 1..25: mol_type = other DNA; mol_type = other DNA
gaccaagctagccccctccttggaa

SEQ ID NO: 17143 - DNA, 25 bp, synthetic construct
  source 1..25: mol_type = other DNA; mol_type = other DNA
ggaccaagctagccccctccttgga

SEQ ID NO: 17144 - DNA, 25 bp, synthetic construct
  source 1..25: mol_type = other DNA; mol_type = other DNA
ggaccaagctagccccctccttgaa

SEQ ID NO: 17145 - DNA, 25 bp, synthetic construct
  source 1..25: mol_type = other DNA; mol_type = other DNA
gggaccaagctagccccctccttgg

SEQ ID NO: 17146 - DNA, 25 bp, synthetic construct
  source 1..25: mol_type = other DNA; mol_type = other DNA
gggaccaagctagccccctccttga

SEQ ID NO: 17147 - DNA, 25 bp, synthetic construct
  source 1..25: mol_type = other DNA; mol_type = other DNA
gggaccaagctagccccctccttaa

SEQ ID NO: 17148 - DNA, 25 bp, synthetic construct
  source 1..25: mol_type = other DNA; mol_type = other DNA
agggaccaagctagccccctccttg

SEQ ID NO: 17149 - DNA, 25 bp, synthetic construct
  source 1..25: mol_type = other DNA; mol_type = other DNA
gaggaccaagctagccccctccttg

SEQ ID NO: 17150 - DNA, 25 bp, synthetic construct
  source 1..25: mol_type = other DNA; mol_type = other DNA
ggagaccaagctagccccctccttg

SEQ ID NO: 17151 - DNA, 25 bp, synthetic construct
  source 1..25: mol_type = other DNA; mol_type = other DNA
gggaaccaagctagccccctccttg

SEQ ID NO: 17152 - DNA, 25 bp, synthetic construct
  source 1..25: mol_type = other DNA; mol_type = other DNA
tagggaccaagctagccccctcctt

SEQ ID NO: 17153 - DNA, 25 bp, synthetic construct
  source 1..25: mol_type = other DNA; mol_type = other DNA
tgaggaccaagctagccccctcctt

SEQ ID NO: 17154 - DNA, 25 bp, synthetic construct
  source 1..25: mol_type = other DNA; mol_type = other DNA
tggagaccaagctagccccctcctt

SEQ ID NO: 17155 - DNA, 25 bp, synthetic construct
  source 1..25: mol_type = other DNA; mol_type = other DNA
tgggaaccaagctagccccctcctt

SEQ ID NO: 17156 - DNA, 25 bp, synthetic construct
  source 1..25: mol_type = other DNA; mol_type = other DNA
attgggaccaagctagccccctcct

SEQ ID NO: 17157 - DNA, 25 bp, synthetic construct
  source 1..25: mol_type = other DNA; mol_type = other DNA
atgtggaccaagctagccccctcct

SEQ ID NO: 17158 - DNA, 25 bp, synthetic construct
  source 1..25: mol_type = other DNA; mol_type = other DNA
atggtgaccaagctagccccctcct

SEQ ID NO: 17159 - DNA, 25 bp, synthetic construct
  source 1..25: mol_type = other DNA; mol_type = other DNA
atgggtaccaagctagccccctcct

SEQ ID NO: 17160 - DNA, 25 bp, synthetic construct
  source 1..25: mol_type = other DNA; mol_type = other DNA
cattgggaccaagctagccccctcc

SEQ ID NO: 17161 - DNA, 25 bp, synthetic construct
  source 1..25: mol_type = other DNA; mol_type = other DNA
catgtggaccaagctagccccctcc

SEQ ID NO: 17162 - DNA, 25 bp, synthetic construct
  source 1..25: mol_type = other DNA; mol_type = other DNA
catggtgaccaagctagccccctcc

SEQ ID NO: 17163 - DNA, 25 bp, synthetic construct
  source 1..25: mol_type = other DNA; mol_type = other DNA
catgggtaccaagctagccccctcc

SEQ ID NO: 17164 - DNA, 25 bp, synthetic construct
  source 1..25: mol_type = other DNA; mol_type = other DNA
gcattgggaccaagctagccccctc

SEQ ID NO: 17165 - DNA, 25 bp, synthetic construct
  source 1..25: mol_type = other DNA; mol_type = other DNA
gcatgtggaccaagctagccccctc

SEQ ID NO: 17166 - DNA, 25 bp, synthetic construct
  source 1..25: mol_type = other DNA; mol_type = other DNA
gcatggtgaccaagctagccccctc

SEQ ID NO: 17167 - DNA, 25 bp, synthetic construct
  source 1..25: mol_type = other DNA; mol_type = other DNA
gcatgggtaccaagctagccccctc

SEQ ID NO: 17168 - DNA, 25 bp, synthetic construct
  source 1..25: mol_type = other DNA; mol_type = other DNA
agcattgggaccaagctagccccct

SEQ ID NO: 17169 - DNA, 25 bp, synthetic construct
  source 1..25: mol_type = other DNA; mol_type = other DNA
agcatgtggaccaagctagccccct

SEQ ID NO: 17170 - DNA, 25 bp, synthetic construct
  source 1..25: mol_type = other DNA; mol_type = other DNA
agcatggtgaccaagctagccccct

SEQ ID NO: 17171 - DNA, 25 bp, synthetic construct
  source 1..25: mol_type = other DNA; mol_type = other DNA
agcatgggtaccaagctagccccct

SEQ ID NO: 17172 - DNA, 25 bp, synthetic construct
  source 1..25: mol_type = other DNA; mol_type = other DNA
gaagaccaagctagccccctccttg

SEQ ID NO: 17173 - DNA, 25 bp, synthetic construct
  source 1..25: mol_type = other DNA; mol_type = other DNA
gagaaccaagctagccccctccttg

SEQ ID NO: 17174 - DNA, 25 bp, synthetic construct
  source 1..25: mol_type = other DNA; mol_type = other DNA
gaggaccaaactagccccctccttg

SEQ ID NO: 17175 - DNA, 25 bp, synthetic construct
  source 1..25: mol_type = other DNA; mol_type = other DNA
gaggaccaagctaaccccctccttg

SEQ ID NO: 17176 - DNA, 25 bp, synthetic construct
  source 1..25: mol_type = other DNA; mol_type = other DNA
gaggaccaagctagccccctcctta

SEQ ID NO: 17177 - DNA, 25 bp, synthetic construct
  source 1..25: mol_type = other DNA; mol_type = other DNA
tgaagaccaagctagccccctcctt

SEQ ID NO: 17178 - DNA, 25 bp, synthetic construct
  source 1..25: mol_type = other DNA; mol_type = other DNA
tgagaaccaagctagccccctcctt

SEQ ID NO: 17179 - DNA, 25 bp, synthetic construct
  source 1..25: mol_type = other DNA; mol_type = other DNA
tgaggaccaaactagccccctcctt

SEQ ID NO: 17180 - DNA, 25 bp, synthetic construct
  source 1..25: mol_type = other DNA; mol_type = other DNA
tgaggaccaagctaaccccctcctt

SEQ ID NO: 17181 - DNA, 25 bp, synthetic construct
  source 1..25: mol_type = other DNA; mol_type = other DNA
atgaagaccaagctagccccctcct

SEQ ID NO: 17182 - DNA, 25 bp, synthetic construct
  source 1..25: mol_type = other DNA; mol_type = other DNA
atgagaaccaagctagccccctcct

SEQ ID NO: 17183 - DNA, 25 bp, synthetic construct
  source 1..25: mol_type = other DNA; mol_type = other DNA
atgaggaccaaactagccccctcct

SEQ ID NO: 17184 - DNA, 25 bp, synthetic construct
  source 1..25: mol_type = other DNA; mol_type = other DNA
atgaggaccaagctaaccccctcct

SEQ ID NO: 17185 - DNA, 25 bp, synthetic construct
  source 1..25: mol_type = other DNA; mol_type = other DNA
catgaagaccaagctagccccctcc

SEQ ID NO: 17186 - DNA, 25 bp, synthetic construct
  source 1..25: mol_type = other DNA; mol_type = other DNA
catgagaaccaagctagccccctcc

SEQ ID NO: 17187 - DNA, 25 bp, synthetic construct
  source 1..25: mol_type = other DNA; mol_type = other DNA
catgaggaccaaactagccccctcc

SEQ ID NO: 17188 - DNA, 25 bp, synthetic construct
  source 1..25: mol_type = other DNA; mol_type = other DNA
catgaggaccaagctaaccccctcc

SEQ ID NO: 17189 - DNA, 25 bp, synthetic construct
  source 1..25: mol_type = other DNA; mol_type = other DNA
acatgaggaccaagctagccccctc

SEQ ID NO: 17190 - DNA, 25 bp, synthetic construct
  source 1..25: mol_type = other DNA; mol_type = other DNA
gcatgaagaccaagctagccccctc

SEQ ID NO: 17191 - DNA, 25 bp, synthetic construct
  source 1..25: mol_type = other DNA; mol_type = other DNA
gcatgagaaccaagctagccccctc

SEQ ID NO: 17192 - DNA, 25 bp, synthetic construct
  source 1..25: mol_type = other DNA; mol_type = other DNA
gcatgaggaccaaactagccccctc

SEQ ID NO: 17193 - DNA, 25 bp, synthetic construct
  source 1..25: mol_type = other DNA; mol_type = other DNA
gcatgaggaccaagctaaccccctc

SEQ ID NO: 17194 - DNA, 25 bp, synthetic construct
  source 1..25: mol_type = other DNA; mol_type = other DNA
agcatgaagaccaagctagccccct

SEQ ID NO: 17195 - DNA, 25 bp, synthetic construct
  source 1..25: mol_type = other DNA; mol_type = other DNA
agcatgagaaccaagctagccccct

SEQ ID NO: 17196 - DNA, 25 bp, synthetic construct
  source 1..25: mol_type = other DNA; mol_type = other DNA
agcatgaggaccaaactagccccct

SEQ ID NO: 17197 - DNA, 25 bp, synthetic construct
  source 1..25: mol_type = other DNA; mol_type = other DNA
agcatgaggaccaagctaaccccct

SEQ ID NO: 17198 - DNA, 25 bp, synthetic construct
  source 1..25: mol_type = other DNA; mol_type = other DNA
gaagaggagacagggtactctcaca

SEQ ID NO: 17199 - DNA, 25 bp, synthetic construct
  source 1..25: mol_type = other DNA; mol_type = other DNA
gaagaggagacaggatactctcaca

SEQ ID NO: 17200 - DNA, 25 bp, synthetic construct
  source 1..25: mol_type = other DNA; mol_type = other DNA
ggaagaggagacagggtgctctcac

SEQ ID NO: 17201 - DNA, 25 bp, synthetic construct
  source 1..25: mol_type = other DNA; mol_type = other DNA
ggaagaggagacagggtactctcac

SEQ ID NO: 17202 - DNA, 25 bp, synthetic construct
  source 1..25: mol_type = other DNA; mol_type = other DNA
ggaagaggagacaggatactctcac

SEQ ID NO: 17203 - DNA, 25 bp, synthetic construct
  source 1..25: mol_type = other DNA; mol_type = other DNA
tggaagaggagacagggtgctctca

SEQ ID NO: 17204 - DNA, 25 bp, synthetic construct
  source 1..25: mol_type = other DNA; mol_type = other DNA
tggaagaggagacagggtactctca

SEQ ID NO: 17205 - DNA, 25 bp, synthetic construct
  source 1..25: mol_type = other DNA; mol_type = other DNA
tggaagaggagacaggatactctca

SEQ ID NO: 17206 - DNA, 25 bp, synthetic construct
  source 1..25: mol_type = other DNA; mol_type = other DNA
ttggaagaggagacagggtactctc

SEQ ID NO: 17207 - DNA, 25 bp, synthetic construct
  source 1..25: mol_type = other DNA; mol_type = other DNA
ttggaagaggagacaggatactctc

SEQ ID NO: 17208 - DNA, 25 bp, synthetic construct
  source 1..25: mol_type = other DNA; mol_type = other DNA
tttggaagaggagacagggtgctct

SEQ ID NO: 17209 - DNA, 25 bp, synthetic construct
  source 1..25: mol_type = other DNA; mol_type = other DNA
tttggaagaggagacagggtactct

SEQ ID NO: 17210 - DNA, 25 bp, synthetic construct
  source 1..25: mol_type = other DNA; mol_type = other DNA
tttggaagaggagacaggatactct

SEQ ID NO: 17211 - DNA, 25 bp, synthetic construct
  source 1..25: mol_type = other DNA; mol_type = other DNA
ctttggaagaggagacagggtgctc

SEQ ID NO: 17212 - DNA, 25 bp, synthetic construct
  source 1..25: mol_type = other DNA; mol_type = other DNA
ctttggaagaggagacagggtactc

SEQ ID NO: 17213 - DNA, 25 bp, synthetic construct
  source 1..25: mol_type = other DNA; mol_type = other DNA
ctttggaagaggagacaggatactc

SEQ ID NO: 17214 - DNA, 25 bp, synthetic construct
  source 1..25: mol_type = other DNA; mol_type = other DNA
tctttggaagaggagacagggtact

SEQ ID NO: 17215 - DNA, 25 bp, synthetic construct
  source 1..25: mol_type = other DNA; mol_type = other DNA
tctttggaagaggagacaggatact

SEQ ID NO: 17216 - DNA, 25 bp, synthetic construct
  source 1..25: mol_type = other DNA; mol_type = other DNA
ttctttggaagaggagacagggtgc

SEQ ID NO: 17217 - DNA, 25 bp, synthetic construct
  source 1..25: mol_type = other DNA; mol_type = other DNA
ttctttggaagaggagacagggtac

SEQ ID NO: 17218 - DNA, 25 bp, synthetic construct
  source 1..25: mol_type = other DNA; mol_type = other DNA
ttctttggaagaggagacaggatac

SEQ ID NO: 17219 - DNA, 25 bp, synthetic construct
  source 1..25: mol_type = other DNA; mol_type = other DNA
tttctttggaagaggagacagggtg

SEQ ID NO: 17220 - DNA, 25 bp, synthetic construct
  source 1..25: mol_type = other DNA; mol_type = other DNA
tttctttggaagaggagacagggta

SEQ ID NO: 17221 - DNA, 25 bp, synthetic construct
  source 1..25: mol_type = other DNA; mol_type = other DNA
tttctttggaagaggagacaggata

SEQ ID NO: 17222 - DNA, 25 bp, synthetic construct
  source 1..25: mol_type = other DNA; mol_type = other DNA
ctttctttggaagaggagacaggat

SEQ ID NO: 17223 - DNA, 25 bp, synthetic construct
  source 1..25: mol_type = other DNA; mol_type = other DNA
ctttctttggaagaggagacagaat

SEQ ID NO: 17224 - DNA, 25 bp, synthetic construct
  source 1..25: mol_type = other DNA; mol_type = other DNA
actttctttggaagaggagacaggg

SEQ ID NO: 17225 - DNA, 25 bp, synthetic construct
  source 1..25: mol_type = other DNA; mol_type = other DNA
actttctttggaagaggagacagga

SEQ ID NO: 17226 - DNA, 25 bp, synthetic construct
  source 1..25: mol_type = other DNA; mol_type = other DNA
actttctttggaagaggagacagaa

SEQ ID NO: 17227 - DNA, 25 bp, synthetic construct
  source 1..25: mol_type = other DNA; mol_type = other DNA
gactttctttggaagaggagacagg

SEQ ID NO: 17228 - DNA, 25 bp, synthetic construct
  source 1..25: mol_type = other DNA; mol_type = other DNA
gactttctttggaagaggagacaga

SEQ ID NO: 17229 - DNA, 25 bp, synthetic construct
  source 1..25: mol_type = other DNA; mol_type = other DNA
gactttctttggaagaggagacaaa

SEQ ID NO: 17230 - DNA, 25 bp, synthetic construct
  source 1..25: mol_type = other DNA; mol_type = other DNA
tgactttctttggaagaggagacaa

SEQ ID NO: 17231 - DNA, 25 bp, synthetic construct
  source 1..25: mol_type = other DNA; mol_type = other DNA
tgactttctttggaagaggaaacaa

SEQ ID NO: 17232 - DNA, 25 bp, synthetic construct
  source 1..25: mol_type = other DNA; mol_type = other DNA
ctgactttctttggaagaggagaca

SEQ ID NO: 17233 - DNA, 25 bp, synthetic construct
  source 1..25: mol_type = other DNA; mol_type = other DNA
ctgactttctttggaagaggaaaca

SEQ ID NO: 17234 - DNA, 25 bp, synthetic construct
  source 1..25: mol_type = other DNA; mol_type = other DNA
ctgactttctttggaagagaaaaca

SEQ ID NO: 17235 - DNA, 25 bp, synthetic construct
  source 1..25: mol_type = other DNA; mol_type = other DNA
tctgactttctttggaagaggagac

SEQ ID NO: 17236 - DNA, 25 bp, synthetic construct
  source 1..25: mol_type = other DNA; mol_type = other DNA
tctgactttctttggaagaggaaac

SEQ ID NO: 17237 - DNA, 25 bp, synthetic construct
  source 1..25: mol_type = other DNA; mol_type = other DNA
tctgactttctttggaagagaaaac

SEQ ID NO: 17238 - DNA, 25 bp, synthetic construct
  source 1..25: mol_type = other DNA; mol_type = other DNA
ctctgactttctttggaagaggaaa

SEQ ID NO: 17239 - DNA, 25 bp, synthetic construct
  source 1..25: mol_type = other DNA; mol_type = other DNA
ctctgactttctttggaagagaaaa

SEQ ID NO: 17240 - DNA, 25 bp, synthetic construct
  source 1..25: mol_type = other DNA; mol_type = other DNA
cctctgactttctttggaagaggag

SEQ ID NO: 17241 - DNA, 25 bp, synthetic construct
  source 1..25: mol_type = other DNA; mol_type = other DNA
cctctgactttctttggaagaggaa

SEQ ID NO: 17242 - DNA, 25 bp, synthetic construct
  source 1..25: mol_type = other DNA; mol_type = other DNA
cctctgactttctttggaagagaaa

SEQ ID NO: 17243 - DNA, 25 bp, synthetic construct
  source 1..25: mol_type = other DNA; mol_type = other DNA
gcctctgactttctttggaagagga

SEQ ID NO: 17244 - DNA, 25 bp, synthetic construct
  source 1..25: mol_type = other DNA; mol_type = other DNA
gcctctgactttctttggaagagaa

SEQ ID NO: 17245 - DNA, 25 bp, synthetic construct
  source 1..25: mol_type = other DNA; mol_type = other DNA
gcctctgactttctttggaagaaaa

SEQ ID NO: 17246 - DNA, 25 bp, synthetic construct
  source 1..25: mol_type = other DNA; mol_type = other DNA
ggcctctgactttctttggaagaga

SEQ ID NO: 17247 - DNA, 25 bp, synthetic construct
  source 1..25: mol_type = other DNA; mol_type = other DNA
ggcctctgactttctttggaagaaa

SEQ ID NO: 17248 - DNA, 25 bp, synthetic construct
  source 1..25: mol_type = other DNA; mol_type = other DNA
tggcctctgactttctttggaagag

SEQ ID NO: 17249 - DNA, 25 bp, synthetic construct
  source 1..25: mol_type = other DNA; mol_type = other DNA
tggcctctgactttctttggaagaa

SEQ ID NO: 17250 - DNA, 25 bp, synthetic construct
  source 1..25: mol_type = other DNA; mol_type = other DNA
tggcctctgactttctttggaaaaa

SEQ ID NO: 17251 - DNA, 25 bp, synthetic construct
  source 1..25: mol_type = other DNA; mol_type = other DNA
atggcctctgactttctttggaaga

SEQ ID NO: 17252 - DNA, 25 bp, synthetic construct
  source 1..25: mol_type = other DNA; mol_type = other DNA
atggcctctgactttctttggaaaa

SEQ ID NO: 17253 - DNA, 25 bp, synthetic construct
  source 1..25: mol_type = other DNA; mol_type = other DNA
atggcctctgactttctttgaaaaa

SEQ ID NO: 17254 - DNA, 25 bp, synthetic construct
  source 1..25: mol_type = other DNA; mol_type = other DNA
gatggcctctgactttctttggaaa

SEQ ID NO: 17255 - DNA, 25 bp, synthetic construct
  source 1..25: mol_type = other DNA; mol_type = other DNA
gatggcctctgactttctttgaaaa

SEQ ID NO: 17256 - DNA, 25 bp, synthetic construct
  source 1..25: mol_type = other DNA; mol_type = other DNA
ggatggcctctgactttctttggaa

SEQ ID NO: 17257 - DNA, 25 bp, synthetic construct
  source 1..25: mol_type = other DNA; mol_type = other DNA
ggatggcctctgactttctttgaaa

SEQ ID NO: 17258 - DNA, 25 bp, synthetic construct
  source 1..25: mol_type = other DNA; mol_type = other DNA
ggatggcctctgactttctttaaaa

SEQ ID NO: 17259 - DNA, 25 bp, synthetic construct
  source 1..25: mol_type = other DNA; mol_type = other DNA
aggatggcctctgactttctttgga

SEQ ID NO: 17260 - DNA, 25 bp, synthetic construct
  source 1..25: mol_type = other DNA; mol_type = other DNA
aggatggcctctgactttctttgaa

SEQ ID NO: 17261 - DNA, 25 bp, synthetic construct
  source 1..25: mol_type = other DNA; mol_type = other DNA
aggatggcctctgactttctttaaa

SEQ ID NO: 17262 - DNA, 25 bp, synthetic construct
  source 1..25: mol_type = other DNA; mol_type = other DNA
caggatggcctctgactttctttga

SEQ ID NO: 17263 - DNA, 25 bp, synthetic construct
  source 1..25: mol_type = other DNA; mol_type = other DNA
caggatggcctctgactttctttaa

SEQ ID NO: 17264 - DNA, 25 bp, synthetic construct
  source 1..25: mol_type = other DNA; mol_type = other DNA
gcaggatggcctctgactttctttg

SEQ ID NO: 17265 - DNA, 25 bp, synthetic construct
  source 1..25: mol_type = other DNA; mol_type = other DNA
gcaggatggcctctgactttcttta

SEQ ID NO: 17266 - DNA, 25 bp, synthetic construct
  source 1..25: mol_type = other DNA; mol_type = other DNA
gcaggatggcctctaactttcttta

SEQ ID NO: 17267 - DNA, 25 bp, synthetic construct
  source 1..25: mol_type = other DNA; mol_type = other DNA
tgcaggatggcctctgactttcttt

SEQ ID NO: 17268 - DNA, 25 bp, synthetic construct
  source 1..25: mol_type = other DNA; mol_type = other DNA
tgcaggatggcctctaactttcttt

SEQ ID NO: 17269 - DNA, 25 bp, synthetic construct
  source 1..25: mol_type = other DNA; mol_type = other DNA
tgcaggatgacctctaactttcttt

SEQ ID NO: 17270 - DNA, 25 bp, synthetic construct
  source 1..25: mol_type = other DNA; mol_type = other DNA
gtgcaggatggcctctaactttctt

SEQ ID NO: 17271 - DNA, 25 bp, synthetic construct
  source 1..25: mol_type = other DNA; mol_type = other DNA
gtgcaggatgacctctaactttctt

SEQ ID NO: 17272 - DNA, 25 bp, synthetic construct
  source 1..25: mol_type = other DNA; mol_type = other DNA
ggtgcaggatggcctctgactttct

SEQ ID NO: 17273 - DNA, 25 bp, synthetic construct
  source 1..25: mol_type = other DNA; mol_type = other DNA
ggtgcaggatggcctctaactttct

SEQ ID NO: 17274 - DNA, 25 bp, synthetic construct
  source 1..25: mol_type = other DNA; mol_type = other DNA
ggtgcaggatgacctctaactttct

SEQ ID NO: 17275 - DNA, 25 bp, synthetic construct
  source 1..25: mol_type = other DNA; mol_type = other DNA
gggtgcaggatggcctctgactttc

SEQ ID NO: 17276 - DNA, 25 bp, synthetic construct
  source 1..25: mol_type = other DNA; mol_type = other DNA
gggtgcaggatggcctctaactttc

SEQ ID NO: 17277 - DNA, 25 bp, synthetic construct
  source 1..25: mol_type = other DNA; mol_type = other DNA
gggtgcaggatgacctctaactttc

SEQ ID NO: 17278 - DNA, 25 bp, synthetic construct
  source 1..25: mol_type = other DNA; mol_type = other DNA
agggtgcaggatggcctctaacttt

SEQ ID NO: 17279 - DNA, 25 bp, synthetic construct
  source 1..25: mol_type = other DNA; mol_type = other DNA
agggtgcaggatgacctctaacttt

SEQ ID NO: 17280 - DNA, 25 bp, synthetic construct
  source 1..25: mol_type = other DNA; mol_type = other DNA
agggattcaccagggaaccccgctc

SEQ ID NO: 17281 - DNA, 25 bp, synthetic construct
  source 1..25: mol_type = other DNA; mol_type = other DNA
agggattcaccagggaaccccactc

SEQ ID NO: 17282 - DNA, 25 bp, synthetic construct
  source 1..25: mol_type = other DNA; mol_type = other DNA
agggattcaccaggaaaccccactc

SEQ ID NO: 17283 - DNA, 25 bp, synthetic construct
  source 1..25: mol_type = other DNA; mol_type = other DNA
cagggattcaccagggaaccccgct

SEQ ID NO: 17284 - DNA, 25 bp, synthetic construct
  source 1..25: mol_type = other DNA; mol_type = other DNA
cagggattcaccagggaaccccact

SEQ ID NO: 17285 - DNA, 25 bp, synthetic construct
  source 1..25: mol_type = other DNA; mol_type = other DNA
cagggattcaccaggaaaccccact

SEQ ID NO: 17286 - DNA, 25 bp, synthetic construct
  source 1..25: mol_type = other DNA; mol_type = other DNA
gcagggattcaccagggaaccccac

SEQ ID NO: 17287 - DNA, 25 bp, synthetic construct
  source 1..25: mol_type = other DNA; mol_type = other DNA
gcagggattcaccaggaaaccccac

SEQ ID NO: 17288 - DNA, 25 bp, synthetic construct
  source 1..25: mol_type = other DNA; mol_type = other DNA
agcagggattcaccagggaaccccg

SEQ ID NO: 17289 - DNA, 25 bp, synthetic construct
  source 1..25: mol_type = other DNA; mol_type = other DNA
agcagggattcaccagggaacccca

SEQ ID NO: 17290 - DNA, 25 bp, synthetic construct
  source 1..25: mol_type = other DNA; mol_type = other DNA
agcagggattcaccaggaaacccca

SEQ ID NO: 17291 - DNA, 25 bp, synthetic construct
  source 1..25: mol_type = other DNA; mol_type = other DNA
cagcagggattcaccagggaacccc

SEQ ID NO: 17292 - DNA, 25 bp, synthetic construct
  source 1..25: mol_type = other DNA; mol_type = other DNA
cagcagggattcaccaggaaacccc

SEQ ID NO: 17293 - DNA, 25 bp, synthetic construct
  source 1..25: mol_type = other DNA; mol_type = other DNA
cagcagggattcaccagaaaacccc

SEQ ID NO: 17294 - DNA, 25 bp, synthetic construct
  source 1..25: mol_type = other DNA; mol_type = other DNA
gcagcagggattcaccaggaaaccc

SEQ ID NO: 17295 - DNA, 25 bp, synthetic construct
  source 1..25: mol_type = other DNA; mol_type = other DNA
gcagcagggattcaccagaaaaccc

SEQ ID NO: 17296 - DNA, 25 bp, synthetic construct
  source 1..25: mol_type = other DNA; mol_type = other DNA
agcagcagggattcaccagggaacc

SEQ ID NO: 17297 - DNA, 25 bp, synthetic construct
  source 1..25: mol_type = other DNA; mol_type = other DNA
agcagcagggattcaccaggaaacc

SEQ ID NO: 17298 - DNA, 25 bp, synthetic construct
  source 1..25: mol_type = other DNA; mol_type = other DNA
agcagcagggattcaccagaaaacc

SEQ ID NO: 17299 - DNA, 25 bp, synthetic construct
  source 1..25: mol_type = other DNA; mol_type = other DNA
aagcagcagggattcaccagggaac

SEQ ID NO: 17300 - DNA, 25 bp, synthetic construct
  source 1..25: mol_type = other DNA; mol_type = other DNA
aagcagcagggattcaccaggaaac

SEQ ID NO: 17301 - DNA, 25 bp, synthetic construct
  source 1..25: mol_type = other DNA; mol_type = other DNA
aagcagcagggattcaccagaaaac

SEQ ID NO: 17302 - DNA, 25 bp, synthetic construct
  source 1..25: mol_type = other DNA; mol_type = other DNA
caagcagcagggattcaccaggaaa

SEQ ID NO: 17303 - DNA, 25 bp, synthetic construct
  source 1..25: mol_type = other DNA; mol_type = other DNA
caagcagcagggattcaccagaaaa

SEQ ID NO: 17304 - DNA, 25 bp, synthetic construct
  source 1..25: mol_type = other DNA; mol_type = other DNA
ccaagcagcagggattcaccaggga

SEQ ID NO: 17305 - DNA, 25 bp, synthetic construct
  source 1..25: mol_type = other DNA; mol_type = other DNA
ccaagcagcagggattcaccaggaa

SEQ ID NO: 17306 - DNA, 25 bp, synthetic construct
  source 1..25: mol_type = other DNA; mol_type = other DNA
ccaagcagcagggattcaccagaaa

SEQ ID NO: 17307 - DNA, 25 bp, synthetic construct
  source 1..25: mol_type = other DNA; mol_type = other DNA
cccaagcagcagggattcaccaggg

SEQ ID NO: 17308 - DNA, 25 bp, synthetic construct
  source 1..25: mol_type = other DNA; mol_type = other DNA
cccaagcagcagggattcaccagga

SEQ ID NO: 17309 - DNA, 25 bp, synthetic construct
  source 1..25: mol_type = other DNA; mol_type = other DNA
cccaagcagcagggattcaccagaa

SEQ ID NO: 17310 - DNA, 25 bp, synthetic construct
  source 1..25: mol_type = other DNA; mol_type = other DNA
ccccaagcagcagggattcaccaga

SEQ ID NO: 17311 - DNA, 25 bp, synthetic construct
  source 1..25: mol_type = other DNA; mol_type = other DNA
ccccaagcagcagggattcaccaaa

SEQ ID NO: 17312 - DNA, 25 bp, synthetic construct
  source 1..25: mol_type = other DNA; mol_type = other DNA
tccccaagcagcagggattcaccag

SEQ ID NO: 17313 - DNA, 25 bp, synthetic construct
  source 1..25: mol_type = other DNA; mol_type = other DNA
tccccaagcagcagggattcaccaa

SEQ ID NO: 17314 - DNA, 25 bp, synthetic construct
  source 1..25: mol_type = other DNA; mol_type = other DNA
tccccaagcagcaggaattcaccaa

SEQ ID NO: 17315 - DNA, 25 bp, synthetic construct
  source 1..25: mol_type = other DNA; mol_type = other DNA
ctccccaagcagcagggattcacca

SEQ ID NO: 17316 - DNA, 25 bp, synthetic construct
  source 1..25: mol_type = other DNA; mol_type = other DNA
ctccccaagcagcaggaattcacca

SEQ ID NO: 17317 - DNA, 25 bp, synthetic construct
  source 1..25: mol_type = other DNA; mol_type = other DNA
ctccccaagcagcagaaattcacca

SEQ ID NO: 17318 - DNA, 25 bp, synthetic construct
  source 1..25: mol_type = other DNA; mol_type = other DNA
cctccccaagcagcaggaattcacc

SEQ ID NO: 17319 - DNA, 25 bp, synthetic construct
  source 1..25: mol_type = other DNA; mol_type = other DNA
cctccccaagcagcagaaattcacc

SEQ ID NO: 17320 - DNA, 25 bp, synthetic construct
  source 1..25: mol_type = other DNA; mol_type = other DNA
gcctccccaagcagcagggattcac

SEQ ID NO: 17321 - DNA, 25 bp, synthetic construct
  source 1..25: mol_type = other DNA; mol_type = other DNA
gcctccccaagcagcaggaattcac

SEQ ID NO: 17322 - DNA, 25 bp, synthetic construct
  source 1..25: mol_type = other DNA; mol_type = other DNA
gcctccccaagcagcagaaattcac

SEQ ID NO: 17323 - DNA, 25 bp, synthetic construct
  source 1..25: mol_type = other DNA; mol_type = other DNA
ggcctccccaagcagcagggattca

SEQ ID NO: 17324 - DNA, 25 bp, synthetic construct
  source 1..25: mol_type = other DNA; mol_type = other DNA
ggcctccccaagcagcaggaattca

SEQ ID NO: 17325 - DNA, 25 bp, synthetic construct
  source 1..25: mol_type = other DNA; mol_type = other DNA
ggcctccccaagcagcagaaattca

SEQ ID NO: 17326 - DNA, 25 bp, synthetic construct
  source 1..25: mol_type = other DNA; mol_type = other DNA
gggcctccccaagcagcaggaattc

SEQ ID NO: 17327 - DNA, 25 bp, synthetic construct
  source 1..25: mol_type = other DNA; mol_type = other DNA
gggcctccccaagcagcagaaattc

SEQ ID NO: 17328 - DNA, 25 bp, synthetic construct
  source 1..25: mol_type = other DNA; mol_type = other DNA
tgggcctccccaagcagcagggatt

SEQ ID NO: 17329 - DNA, 25 bp, synthetic construct
  source 1..25: mol_type = other DNA; mol_type = other DNA
gtggcctccccaagcagcagggatt

SEQ ID NO: 17330 - DNA, 25 bp, synthetic construct
  source 1..25: mol_type = other DNA; mol_type = other DNA
ggtgcctccccaagcagcagggatt

SEQ ID NO: 17331 - DNA, 25 bp, synthetic construct
  source 1..25: mol_type = other DNA; mol_type = other DNA
gggtcctccccaagcagcagggatt

SEQ ID NO: 17332 - DNA, 25 bp, synthetic construct
  source 1..25: mol_type = other DNA; mol_type = other DNA
ttgggcctccccaagcagcagggat

SEQ ID NO: 17333 - DNA, 25 bp, synthetic construct
  source 1..25: mol_type = other DNA; mol_type = other DNA
tgtggcctccccaagcagcagggat

SEQ ID NO: 17334 - DNA, 25 bp, synthetic construct
  source 1..25: mol_type = other DNA; mol_type = other DNA
tggtgcctccccaagcagcagggat

SEQ ID NO: 17335 - DNA, 25 bp, synthetic construct
  source 1..25: mol_type = other DNA; mol_type = other DNA
tgggtcctccccaagcagcagggat

SEQ ID NO: 17336 - DNA, 25 bp, synthetic construct
  source 1..25: mol_type = other DNA; mol_type = other DNA
tttgggcctccccaagcagcaggga

SEQ ID NO: 17337 - DNA, 25 bp, synthetic construct
  source 1..25: mol_type = other DNA; mol_type = other DNA
ttgtggcctccccaagcagcaggga

SEQ ID NO: 17338 - DNA, 25 bp, synthetic construct
  source 1..25: mol_type = other DNA; mol_type = other DNA
ttggtgcctccccaagcagcaggga

SEQ ID NO: 17339 - DNA, 25 bp, synthetic construct
  source 1..25: mol_type = other DNA; mol_type = other DNA
ttgggtcctccccaagcagcaggga

SEQ ID NO: 17340 - DNA, 25 bp, synthetic construct
  source 1..25: mol_type = other DNA; mol_type = other DNA
ctttgggcctccccaagcagcaggg

SEQ ID NO: 17341 - DNA, 25 bp, synthetic construct
  source 1..25: mol_type = other DNA; mol_type = other DNA
cttgtggcctccccaagcagcaggg

SEQ ID NO: 17342 - DNA, 25 bp, synthetic construct
  source 1..25: mol_type = other DNA; mol_type = other DNA
cttggtgcctccccaagcagcaggg

SEQ ID NO: 17343 - DNA, 25 bp, synthetic construct
  source 1..25: mol_type = other DNA; mol_type = other DNA
cttgggtcctccccaagcagcaggg

SEQ ID NO: 17344 - DNA, 25 bp, synthetic construct
  source 1..25: mol_type = other DNA; mol_type = other DNA
cctttgggcctccccaagcagcagg

SEQ ID NO: 17345 - DNA, 25 bp, synthetic construct
  source 1..25: mol_type = other DNA; mol_type = other DNA
ccttgtggcctccccaagcagcagg

SEQ ID NO: 17346 - DNA, 25 bp, synthetic construct
  source 1..25: mol_type = other DNA; mol_type = other DNA
ccttggtgcctccccaagcagcagg

SEQ ID NO: 17347 - DNA, 25 bp, synthetic construct
  source 1..25: mol_type = other DNA; mol_type = other DNA
ccttgggtcctccccaagcagcagg

SEQ ID NO: 17348 - DNA, 25 bp, synthetic construct
  source 1..25: mol_type = other DNA; mol_type = other DNA
ccctttgggcctccccaagcagcag

SEQ ID NO: 17349 - DNA, 25 bp, synthetic construct
  source 1..25: mol_type = other DNA; mol_type = other DNA
cccttgtggcctccccaagcagcag

SEQ ID NO: 17350 - DNA, 25 bp, synthetic construct
  source 1..25: mol_type = other DNA; mol_type = other DNA
cccttggtgcctccccaagcagcag

SEQ ID NO: 17351 - DNA, 25 bp, synthetic construct
  source 1..25: mol_type = other DNA; mol_type = other DNA
cccttgggtcctccccaagcagcag

SEQ ID NO: 17352 - DNA, 25 bp, synthetic construct
  source 1..25: mol_type = other DNA; mol_type = other DNA
gccctttgggcctccccaagcagca

SEQ ID NO: 17353 - DNA, 25 bp, synthetic construct
  source 1..25: mol_type = other DNA; mol_type = other DNA
gcccttgtggcctccccaagcagca

SEQ ID NO: 17354 - DNA, 25 bp, synthetic construct
  source 1..25: mol_type = other DNA; mol_type = other DNA
gcccttggtgcctccccaagcagca

SEQ ID NO: 17355 - DNA, 25 bp, synthetic construct
  source 1..25: mol_type = other DNA; mol_type = other DNA
gcccttgggtcctccccaagcagca

SEQ ID NO: 17356 - DNA, 25 bp, synthetic construct
  source 1..25: mol_type = other DNA; mol_type = other DNA
ggcccttagggcctccccaagcagc

SEQ ID NO: 17357 - DNA, 25 bp, synthetic construct
  source 1..25: mol_type = other DNA; mol_type = other DNA
ggcccttgaggcctccccaagcagc

SEQ ID NO: 17358 - DNA, 25 bp, synthetic construct
  source 1..25: mol_type = other DNA; mol_type = other DNA
ggcccttggagcctccccaagcagc

SEQ ID NO: 17359 - DNA, 25 bp, synthetic construct
  source 1..25: mol_type = other DNA; mol_type = other DNA
ggcccttgggacctccccaagcagc

SEQ ID NO: 17360 - DNA, 25 bp, synthetic construct
  source 1..25: mol_type = other DNA; mol_type = other DNA
gggcccttagggcctccccaagcag

SEQ ID NO: 17361 - DNA, 25 bp, synthetic construct
  source 1..25: mol_type = other DNA; mol_type = other DNA
gggcccttgaggcctccccaagcag

SEQ ID NO: 17362 - DNA, 25 bp, synthetic construct
  source 1..25: mol_type = other DNA; mol_type = other DNA
gggcccttggagcctccccaagcag

SEQ ID NO: 17363 - DNA, 25 bp, synthetic construct
  source 1..25: mol_type = other DNA; mol_type = other DNA
gggcccttgggacctccccaagcag

SEQ ID NO: 17364 - DNA, 25 bp, synthetic construct
  source 1..25: mol_type = other DNA; mol_type = other DNA
gaggcctccccaagcagcaaggatt

SEQ ID NO: 17365 - DNA, 25 bp, synthetic construct
  source 1..25: mol_type = other DNA; mol_type = other DNA
gaggcctccccaagcagcagagatt

SEQ ID NO: 17366 - DNA, 25 bp, synthetic construct
  source 1..25: mol_type = other DNA; mol_type = other DNA
gaggcctccccaagcagcaggaatt

SEQ ID NO: 17367 - DNA, 25 bp, synthetic construct
  source 1..25: mol_type = other DNA; mol_type = other DNA
ggagcctccccaagcagcaaggatt

SEQ ID NO: 17368 - DNA, 25 bp, synthetic construct
  source 1..25: mol_type = other DNA; mol_type = other DNA
ggagcctccccaagcagcagagatt

SEQ ID NO: 17369 - DNA, 25 bp, synthetic construct
  source 1..25: mol_type = other DNA; mol_type = other DNA
ggagcctccccaagcagcaggaatt

SEQ ID NO: 17370 - DNA, 25 bp, synthetic construct
  source 1..25: mol_type = other DNA; mol_type = other DNA
tgaggcctccccaagcagcaaggat

SEQ ID NO: 17371 - DNA, 25 bp, synthetic construct
  source 1..25: mol_type = other DNA; mol_type = other DNA
tgaggcctccccaagcagcagagat

SEQ ID NO: 17372 - DNA, 25 bp, synthetic construct
  source 1..25: mol_type = other DNA; mol_type = other DNA
tgaggcctccccaagcagcaggaat

SEQ ID NO: 17373 - DNA, 25 bp, synthetic construct
  source 1..25: mol_type = other DNA; mol_type = other DNA
tggagcctccccaagcagcaaggat

SEQ ID NO: 17374 - DNA, 25 bp, synthetic construct
  source 1..25: mol_type = other DNA; mol_type = other DNA
tggagcctccccaagcagcagagat

SEQ ID NO: 17375 - DNA, 25 bp, synthetic construct
  source 1..25: mol_type = other DNA; mol_type = other DNA
tggagcctccccaagcagcaggaat

SEQ ID NO: 17376 - DNA, 25 bp, synthetic construct
  source 1..25: mol_type = other DNA; mol_type = other DNA
ttgaggcctccccaagcagcaagga

SEQ ID NO: 17377 - DNA, 25 bp, synthetic construct
  source 1..25: mol_type = other DNA; mol_type = other DNA
ttgaggcctccccaagcagcagaga

SEQ ID NO: 17378 - DNA, 25 bp, synthetic construct
  source 1..25: mol_type = other DNA; mol_type = other DNA
ttgaggcctccccaagcagcaggaa

SEQ ID NO: 17379 - DNA, 25 bp, synthetic construct
  source 1..25: mol_type = other DNA; mol_type = other DNA
ttggagcctccccaagcagcaagga

SEQ ID NO: 17380 - DNA, 25 bp, synthetic construct
  source 1..25: mol_type = other DNA; mol_type = other DNA
ttggagcctccccaagcagcagaga

SEQ ID NO: 17381 - DNA, 25 bp, synthetic construct
  source 1..25: mol_type = other DNA; mol_type = other DNA
ttggagcctccccaagcagcaggaa

SEQ ID NO: 17382 - DNA, 25 bp, synthetic construct
  source 1..25: mol_type = other DNA; mol_type = other DNA
cttgaggcctccccaagcagcaagg

SEQ ID NO: 17383 - DNA, 25 bp, synthetic construct
  source 1..25: mol_type = other DNA; mol_type = other DNA
cttgaggcctccccaagcagcagag

SEQ ID NO: 17384 - DNA, 25 bp, synthetic construct
  source 1..25: mol_type = other DNA; mol_type = other DNA
cttgaggcctccccaagcagcagga

SEQ ID NO: 17385 - DNA, 25 bp, synthetic construct
  source 1..25: mol_type = other DNA; mol_type = other DNA
cttggagcctccccaagcagcaagg

SEQ ID NO: 17386 - DNA, 25 bp, synthetic construct
  source 1..25: mol_type = other DNA; mol_type = other DNA
cttggagcctccccaagcagcagag

SEQ ID NO: 17387 - DNA, 25 bp, synthetic construct
  source 1..25: mol_type = other DNA; mol_type = other DNA
cttggagcctccccaagcagcagga

SEQ ID NO: 17388 - DNA, 25 bp, synthetic construct
  source 1..25: mol_type = other DNA; mol_type = other DNA
ccttaaggcctccccaagcagcagg

SEQ ID NO: 17389 - DNA, 25 bp, synthetic construct
  source 1..25: mol_type = other DNA; mol_type = other DNA
ccttagagcctccccaagcagcagg

SEQ ID NO: 17390 - DNA, 25 bp, synthetic construct
  source 1..25: mol_type = other DNA; mol_type = other DNA
ccttaggacctccccaagcagcagg

SEQ ID NO: 17391 - DNA, 25 bp, synthetic construct
  source 1..25: mol_type = other DNA; mol_type = other DNA
ccttggagcctccccaagcaacagg

SEQ ID NO: 17392 - DNA, 25 bp, synthetic construct
  source 1..25: mol_type = other DNA; mol_type = other DNA
ccttggagcctccccaagcagcaag

SEQ ID NO: 17393 - DNA, 25 bp, synthetic construct
  source 1..25: mol_type = other DNA; mol_type = other DNA
ccttggagcctccccaagcagcaga

SEQ ID NO: 17394 - DNA, 25 bp, synthetic construct
  source 1..25: mol_type = other DNA; mol_type = other DNA
cccttaaggcctccccaagcagcag

SEQ ID NO: 17395 - DNA, 25 bp, synthetic construct
  source 1..25: mol_type = other DNA; mol_type = other DNA
cccttagagcctccccaagcagcag

SEQ ID NO: 17396 - DNA, 25 bp, synthetic construct
  source 1..25: mol_type = other DNA; mol_type = other DNA
cccttaggacctccccaagcagcag

SEQ ID NO: 17397 - DNA, 25 bp, synthetic construct
  source 1..25: mol_type = other DNA; mol_type = other DNA
cccttggagcctccccaaacagcag

SEQ ID NO: 17398 - DNA, 25 bp, synthetic construct
  source 1..25: mol_type = other DNA; mol_type = other DNA
cccttggagcctccccaagcaacag

SEQ ID NO: 17399 - DNA, 25 bp, synthetic construct
  source 1..25: mol_type = other DNA; mol_type = other DNA
cccttggagcctccccaagcagcaa

SEQ ID NO: 17400 - DNA, 25 bp, synthetic construct
  source 1..25: mol_type = other DNA; mol_type = other DNA
acccttgaggcctccccaagcagca

SEQ ID NO: 17401 - DNA, 25 bp, synthetic construct
  source 1..25: mol_type = other DNA; mol_type = other DNA
acccttggagcctccccaagcagca

SEQ ID NO: 17402 - DNA, 25 bp, synthetic construct
  source 1..25: mol_type = other DNA; mol_type = other DNA
gcccttaaggcctccccaagcagca

SEQ ID NO: 17403 - DNA, 25 bp, synthetic construct
  source 1..25: mol_type = other DNA; mol_type = other DNA
gcccttagagcctccccaagcagca

SEQ ID NO: 17404 - DNA, 25 bp, synthetic construct
  source 1..25: mol_type = other DNA; mol_type = other DNA
gcccttggagcctccccaaacagca

SEQ ID NO: 17405 - DNA, 25 bp, synthetic construct
  source 1..25: mol_type = other DNA; mol_type = other DNA
gcccttggagcctccccaagcaaca

SEQ ID NO: 17406 - DNA, 25 bp, synthetic construct
  source 1..25: mol_type = other DNA; mol_type = other DNA
agcccttgaggcctccccaagcagc

SEQ ID NO: 17407 - DNA, 25 bp, synthetic construct
  source 1..25: mol_type = other DNA; mol_type = other DNA
agcccttggagcctccccaagcagc

SEQ ID NO: 17408 - DNA, 25 bp, synthetic construct
  source 1..25: mol_type = other DNA; mol_type = other DNA
gacccttgaggcctccccaagcagc

SEQ ID NO: 17409 - DNA, 25 bp, synthetic construct
  source 1..25: mol_type = other DNA; mol_type = other DNA
gacccttggagcctccccaagcagc

SEQ ID NO: 17410 - DNA, 25 bp, synthetic construct
  source 1..25: mol_type = other DNA; mol_type = other DNA
ggcccttggagcctccccaaacagc

SEQ ID NO: 17411 - DNA, 25 bp, synthetic construct
  source 1..25: mol_type = other DNA; mol_type = other DNA
ggcccttggagcctccccaagcaac

SEQ ID NO: 17412 - DNA, 25 bp, synthetic construct
  source 1..25: mol_type = other DNA; mol_type = other DNA
aggcccttgaggcctccccaagcag

SEQ ID NO: 17413 - DNA, 25 bp, synthetic construct
  source 1..25: mol_type = other DNA; mol_type = other DNA
aggcccttggagcctccccaagcag

SEQ ID NO: 17414 - DNA, 25 bp, synthetic construct
  source 1..25: mol_type = other DNA; mol_type = other DNA
gagcccttgaggcctccccaagcag

SEQ ID NO: 17415 - DNA, 25 bp, synthetic construct
  source 1..25: mol_type = other DNA; mol_type = other DNA
gagcccttggagcctccccaagcag

SEQ ID NO: 17416 - DNA, 25 bp, synthetic construct
  source 1..25: mol_type = other DNA; mol_type = other DNA
ggacccttgaggcctccccaagcag

SEQ ID NO: 17417 - DNA, 25 bp, synthetic construct
  source 1..25: mol_type = other DNA; mol_type = other DNA
ggacccttggagcctccccaagcag

SEQ ID NO: 17418 - DNA, 25 bp, synthetic construct
  source 1..25: mol_type = other DNA; mol_type = other DNA
gaggcccttgaggcctccccaagca

SEQ ID NO: 17419 - DNA, 25 bp, synthetic construct
  source 1..25: mol_type = other DNA; mol_type = other DNA
gaggcccttggagcctccccaagca

SEQ ID NO: 17420 - DNA, 25 bp, synthetic construct
  source 1..25: mol_type = other DNA; mol_type = other DNA
ggagcccttgaggcctccccaagca

SEQ ID NO: 17421 - DNA, 25 bp, synthetic construct
  source 1..25: mol_type = other DNA; mol_type = other DNA
ggagcccttggagcctccccaagca

SEQ ID NO: 17422 - DNA, 25 bp, synthetic construct
  source 1..25: mol_type = other DNA; mol_type = other DNA
agaggcccttgaggcctccccaagc

SEQ ID NO: 17423 - DNA, 25 bp, synthetic construct
  source 1..25: mol_type = other DNA; mol_type = other DNA
agaggcccttggagcctccccaagc

SEQ ID NO: 17424 - DNA, 25 bp, synthetic construct
  source 1..25: mol_type = other DNA; mol_type = other DNA
aggagcccttgaggcctccccaagc

SEQ ID NO: 17425 - DNA, 25 bp, synthetic construct
  source 1..25: mol_type = other DNA; mol_type = other DNA
aggagcccttggagcctccccaagc

SEQ ID NO: 17426 - DNA, 25 bp, synthetic construct
  source 1..25: mol_type = other DNA; mol_type = other DNA
aagaggcccttgaggcctccccaag

SEQ ID NO: 17427 - DNA, 25 bp, synthetic construct
  source 1..25: mol_type = other DNA; mol_type = other DNA
aagaggcccttggagcctccccaag

SEQ ID NO: 17428 - DNA, 25 bp, synthetic construct
  source 1..25: mol_type = other DNA; mol_type = other DNA
aaggagcccttgaggcctccccaag

SEQ ID NO: 17429 - DNA, 25 bp, synthetic construct
  source 1..25: mol_type = other DNA; mol_type = other DNA
aaggagcccttggagcctccccaag

SEQ ID NO: 17430 - DNA, 25 bp, synthetic construct
  source 1..25: mol_type = other DNA; mol_type = other DNA
caagaggcccttgaggcctccccaa

SEQ ID NO: 17431 - DNA, 25 bp, synthetic construct
  source 1..25: mol_type = other DNA; mol_type = other DNA
caagaggcccttggagcctccccaa

SEQ ID NO: 17432 - DNA, 25 bp, synthetic construct
  source 1..25: mol_type = other DNA; mol_type = other DNA
caaggagcccttgaggcctccccaa

SEQ ID NO: 17433 - DNA, 25 bp, synthetic construct
  source 1..25: mol_type = other DNA; mol_type = other DNA
caaggagcccttggagcctccccaa

SEQ ID NO: 17434 - DNA, 25 bp, synthetic construct
  source 1..25: mol_type = other DNA; mol_type = other DNA
gtgtggagggctgggcaccctcggg

SEQ ID NO: 17435 - DNA, 25 bp, synthetic construct
  source 1..25: mol_type = other DNA; mol_type = other DNA
gtgtgggaggctgggcaccctcggg

SEQ ID NO: 17436 - DNA, 25 bp, synthetic construct
  source 1..25: mol_type = other DNA; mol_type = other DNA
agtgtggagggctgggcaccctcgg

SEQ ID NO: 17437 - DNA, 25 bp, synthetic construct
  source 1..25: mol_type = other DNA; mol_type = other DNA
agtgtgggaggctgggcaccctcgg

SEQ ID NO: 17438 - DNA, 25 bp, synthetic construct
  source 1..25: mol_type = other DNA; mol_type = other DNA
cagtgtggagggctgggcaccctcg

SEQ ID NO: 17439 - DNA, 25 bp, synthetic construct
  source 1..25: mol_type = other DNA; mol_type = other DNA
cagtgtgggaggctgggcaccctcg

SEQ ID NO: 17440 - DNA, 25 bp, synthetic construct
  source 1..25: mol_type = other DNA; mol_type = other DNA
acagtgtggagggctgggcaccctc

SEQ ID NO: 17441 - DNA, 25 bp, synthetic construct
  source 1..25: mol_type = other DNA; mol_type = other DNA
acagtgtgggaggctgggcaccctc

SEQ ID NO: 17442 - DNA, 25 bp, synthetic construct
  source 1..25: mol_type = other DNA; mol_type = other DNA
cacagtgtggagggctgggcaccct

SEQ ID NO: 17443 - DNA, 25 bp, synthetic construct
  source 1..25: mol_type = other DNA; mol_type = other DNA
cacagtgtgggaggctgggcaccct

SEQ ID NO: 17444 - DNA, 25 bp, synthetic construct
  source 1..25: mol_type = other DNA; mol_type = other DNA
tcacagtgtggagggctgggcaccc

SEQ ID NO: 17445 - DNA, 25 bp, synthetic construct
  source 1..25: mol_type = other DNA; mol_type = other DNA
tcacagtgtgggaggctgggcaccc

SEQ ID NO: 17446 - DNA, 25 bp, synthetic construct
  source 1..25: mol_type = other DNA; mol_type = other DNA
gtcacagtgtggagggctgggcacc

SEQ ID NO: 17447 - DNA, 25 bp, synthetic construct
  source 1..25: mol_type = other DNA; mol_type = other DNA
gtcacagtgtgggaggctgggcacc

SEQ ID NO: 17448 - DNA, 25 bp, synthetic construct
  source 1..25: mol_type = other DNA; mol_type = other DNA
agtcacagtgtggagggctgggcac

SEQ ID NO: 17449 - DNA, 25 bp, synthetic construct
  source 1..25: mol_type = other DNA; mol_type = other DNA
agtcacagtgtgggaggctgggcac

SEQ ID NO: 17450 - DNA, 25 bp, synthetic construct
  source 1..25: mol_type = other DNA; mol_type = other DNA
gagtcacagtgtggagggctgggca

SEQ ID NO: 17451 - DNA, 25 bp, synthetic construct
  source 1..25: mol_type = other DNA; mol_type = other DNA
gagtcacagtgtgggaggctgggca

SEQ ID NO: 17452 - DNA, 25 bp, synthetic construct
  source 1..25: mol_type = other DNA; mol_type = other DNA
ggagtcacagtgtggagggctgggc

SEQ ID NO: 17453 - DNA, 25 bp, synthetic construct
  source 1..25: mol_type = other DNA; mol_type = other DNA
ggagtcacagtgtgggaggctgggc

SEQ ID NO: 17454 - DNA, 25 bp, synthetic construct
  source 1..25: mol_type = other DNA; mol_type = other DNA
aggagtcacagtgtggagggctggg

SEQ ID NO: 17455 - DNA, 25 bp, synthetic construct
  source 1..25: mol_type = other DNA; mol_type = other DNA
aggagtcacagtgtgggaggctggg

SEQ ID NO: 17456 - DNA, 25 bp, synthetic construct
  source 1..25: mol_type = other DNA; mol_type = other DNA
gaggagtcacagtgtggagggctgg

SEQ ID NO: 17457 - DNA, 25 bp, synthetic construct
  source 1..25: mol_type = other DNA; mol_type = other DNA
gaggagtcacagtgtgggaggctgg

SEQ ID NO: 17458 - DNA, 25 bp, synthetic construct
  source 1..25: mol_type = other DNA; mol_type = other DNA
tgaggagtcacagtgtggagggctg

SEQ ID NO: 17459 - DNA, 25 bp, synthetic construct
  source 1..25: mol_type = other DNA; mol_type = other DNA
tgaggagtcacagtgtgggaggctg

SEQ ID NO: 17460 - DNA, 25 bp, synthetic construct
  source 1..25: mol_type = other DNA; mol_type = other DNA
gtgaggagtcacagtgtggagggct

SEQ ID NO: 17461 - DNA, 25 bp, synthetic construct
  source 1..25: mol_type = other DNA; mol_type = other DNA
gtgaggagtcacagtgtgggaggct

SEQ ID NO: 17462 - DNA, 25 bp, synthetic construct
  source 1..25: mol_type = other DNA; mol_type = other DNA
tgtgaggagtcacagtgtggagggc

SEQ ID NO: 17463 - DNA, 25 bp, synthetic construct
  source 1..25: mol_type = other DNA; mol_type = other DNA
tgtgaggagtcacagtgtgggaggc

SEQ ID NO: 17464 - DNA, 25 bp, synthetic construct
  source 1..25: mol_type = other DNA; mol_type = other DNA
gtgtgaggagtcacagtgtggaggg

SEQ ID NO: 17465 - DNA, 25 bp, synthetic construct
  source 1..25: mol_type = other DNA; mol_type = other DNA
gtgtgaggagtcacagtgtgggagg

SEQ ID NO: 17466 - DNA, 25 bp, synthetic construct
  source 1..25: mol_type = other DNA; mol_type = other DNA
agtgtgaggagtcacagtgtgaggg

SEQ ID NO: 17467 - DNA, 25 bp, synthetic construct
  source 1..25: mol_type = other DNA; mol_type = other DNA
agtgtgaggagtcacagtgtggagg

SEQ ID NO: 17468 - DNA, 25 bp, synthetic construct
  source 1..25: mol_type = other DNA; mol_type = other DNA
agtgtgaggagtcacagtgtgggag

SEQ ID NO: 17469 - DNA, 25 bp, synthetic construct
  source 1..25: mol_type = other DNA; mol_type = other DNA
gtggagggctgggcaccctcggagg

SEQ ID NO: 17470 - DNA, 25 bp, synthetic construct
  source 1..25: mol_type = other DNA; mol_type = other DNA
gtgggaggctgggcaccctcggagg

SEQ ID NO: 17471 - DNA, 25 bp, synthetic construct
  source 1..25: mol_type = other DNA; mol_type = other DNA
gtgggaggctgggcaccctcgggag

SEQ ID NO: 17472 - DNA, 25 bp, synthetic construct
  source 1..25: mol_type = other DNA; mol_type = other DNA
tgtggagggctgggcaccctcgagg

SEQ ID NO: 17473 - DNA, 25 bp, synthetic construct
  source 1..25: mol_type = other DNA; mol_type = other DNA
tgtggagggctgggcaccctcggag

SEQ ID NO: 17474 - DNA, 25 bp, synthetic construct
  source 1..25: mol_type = other DNA; mol_type = other DNA
tgtggagggctgggcaccctcggga

SEQ ID NO: 17475 - DNA, 25 bp, synthetic construct
  source 1..25: mol_type = other DNA; mol_type = other DNA
atgtggagggctgggcaccctcggg

SEQ ID NO: 17476 - DNA, 25 bp, synthetic construct
  source 1..25: mol_type = other DNA; mol_type = other DNA
gtgtagggagctgggcaccctcggg

SEQ ID NO: 17477 - DNA, 25 bp, synthetic construct
  source 1..25: mol_type = other DNA; mol_type = other DNA
gtgtggagggctgggcaccctcgga

SEQ ID NO: 17478 - DNA, 25 bp, synthetic construct
  source 1..25: mol_type = other DNA; mol_type = other DNA
aatgtggagggctgggcaccctcgg

SEQ ID NO: 17479 - DNA, 25 bp, synthetic construct
  source 1..25: mol_type = other DNA; mol_type = other DNA
agtgtagggagctgggcaccctcgg

SEQ ID NO: 17480 - DNA, 25 bp, synthetic construct
  source 1..25: mol_type = other DNA; mol_type = other DNA
agtgtggagggctaggcaccctcgg

SEQ ID NO: 17481 - DNA, 25 bp, synthetic construct
  source 1..25: mol_type = other DNA; mol_type = other DNA
agtgtggagggctgggcaccctcga

SEQ ID NO: 17482 - DNA, 25 bp, synthetic construct
  source 1..25: mol_type = other DNA; mol_type = other DNA
caatgtggagggctgggcaccctcg

SEQ ID NO: 17483 - DNA, 25 bp, synthetic construct
  source 1..25: mol_type = other DNA; mol_type = other DNA
cagtgtagggagctgggcaccctcg

SEQ ID NO: 17484 - DNA, 25 bp, synthetic construct
  source 1..25: mol_type = other DNA; mol_type = other DNA
cagtgtggagggctggacaccctcg

SEQ ID NO: 17485 - DNA, 25 bp, synthetic construct
  source 1..25: mol_type = other DNA; mol_type = other DNA
cagtgtgggaggctgggcaccctca

SEQ ID NO: 17486 - DNA, 25 bp, synthetic construct
  source 1..25: mol_type = other DNA; mol_type = other DNA
acaatgtggagggctgggcaccctc

SEQ ID NO: 17487 - DNA, 25 bp, synthetic construct
  source 1..25: mol_type = other DNA; mol_type = other DNA
acagtgtagggagctgggcaccctc

SEQ ID NO: 17488 - DNA, 25 bp, synthetic construct
  source 1..25: mol_type = other DNA; mol_type = other DNA
acagtgtggagggctaggcaccctc

SEQ ID NO: 17489 - DNA, 25 bp, synthetic construct
  source 1..25: mol_type = other DNA; mol_type = other DNA
acagtgtgggaggctggacaccctc

SEQ ID NO: 17490 - DNA, 25 bp, synthetic construct
  source 1..25: mol_type = other DNA; mol_type = other DNA
cacaatgtggagggctgggcaccct

SEQ ID NO: 17491 - DNA, 25 bp, synthetic construct
  source 1..25: mol_type = other DNA; mol_type = other DNA
cacagtgtgaggagctgggcaccct

SEQ ID NO: 17492 - DNA, 25 bp, synthetic construct
  source 1..25: mol_type = other DNA; mol_type = other DNA
cacagtgtggagggctaggcaccct

SEQ ID NO: 17493 - DNA, 25 bp, synthetic construct
  source 1..25: mol_type = other DNA; mol_type = other DNA
cacagtgtgggaggctggacaccct

SEQ ID NO: 17494 - DNA, 25 bp, synthetic construct
  source 1..25: mol_type = other DNA; mol_type = other DNA
tcacaatgtggagggctgggcaccc

SEQ ID NO: 17495 - DNA, 25 bp, synthetic construct
  source 1..25: mol_type = other DNA; mol_type = other DNA
tcacagtgtagggagctgggcaccc

SEQ ID NO: 17496 - DNA, 25 bp, synthetic construct
  source 1..25: mol_type = other DNA; mol_type = other DNA
tcacagtgtggagggctaggcaccc

SEQ ID NO: 17497 - DNA, 25 bp, synthetic construct
  source 1..25: mol_type = other DNA; mol_type = other DNA
tcacagtgtgggaggctggacaccc

SEQ ID NO: 17498 - DNA, 25 bp, synthetic construct
  source 1..25: mol_type = other DNA; mol_type = other DNA
atcacagtgtggagggctgggcacc

SEQ ID NO: 17499 - DNA, 25 bp, synthetic construct
  source 1..25: mol_type = other DNA; mol_type = other DNA
gtcacagtgtagggagctgggcacc

SEQ ID NO: 17500 - DNA, 25 bp, synthetic construct
  source 1..25: mol_type = other DNA; mol_type = other DNA
gtcacagtgtggagggctaggcacc

SEQ ID NO: 17501 - DNA, 25 bp, synthetic construct
  source 1..25: mol_type = other DNA; mol_type = other DNA
gtcacagtgtgggaggctggacacc

SEQ ID NO: 17502 - DNA, 25 bp, synthetic construct
  source 1..25: mol_type = other DNA; mol_type = other DNA
aatcacagtgtggagggctgggcac

SEQ ID NO: 17503 - DNA, 25 bp, synthetic construct
  source 1..25: mol_type = other DNA; mol_type = other DNA
agtcacagtgtagggagctgggcac

SEQ ID NO: 17504 - DNA, 25 bp, synthetic construct
  source 1..25: mol_type = other DNA; mol_type = other DNA
agtcacagtgtggagggctaggcac

SEQ ID NO: 17505 - DNA, 25 bp, synthetic construct
  source 1..25: mol_type = other DNA; mol_type = other DNA
agtcacagtgtgggaggctggacac

SEQ ID NO: 17506 - DNA, 25 bp, synthetic construct
  source 1..25: mol_type = other DNA; mol_type = other DNA
aagtcacagtgtggagggctgggca

SEQ ID NO: 17507 - DNA, 25 bp, synthetic construct
  source 1..25: mol_type = other DNA; mol_type = other DNA
gagtcacagtatgggaggctgggca

SEQ ID NO: 17508 - DNA, 25 bp, synthetic construct
  source 1..25: mol_type = other DNA; mol_type = other DNA
gagtcacagtgtgagggactgggca

SEQ ID NO: 17509 - DNA, 25 bp, synthetic construct
  source 1..25: mol_type = other DNA; mol_type = other DNA
gagtcacagtgtggagggctaggca

SEQ ID NO: 17510 - DNA, 25 bp, synthetic construct
  source 1..25: mol_type = other DNA; mol_type = other DNA
gagtcacagtgtgggaggctggaca

SEQ ID NO: 17511 - DNA, 25 bp, synthetic construct
  source 1..25: mol_type = other DNA; mol_type = other DNA
agagtcacagtgtggagggctgggc

SEQ ID NO: 17512 - DNA, 25 bp, synthetic construct
  source 1..25: mol_type = other DNA; mol_type = other DNA
ggagtcacaatgtgggaggctgggc

SEQ ID NO: 17513 - DNA, 25 bp, synthetic construct
  source 1..25: mol_type = other DNA; mol_type = other DNA
ggagtcacagtgtagggagctgggc

SEQ ID NO: 17514 - DNA, 25 bp, synthetic construct
  source 1..25: mol_type = other DNA; mol_type = other DNA
ggagtcacagtgtgggaggctaggc

SEQ ID NO: 17515 - DNA, 25 bp, synthetic construct
  source 1..25: mol_type = other DNA; mol_type = other DNA
ggagtcacagtgtgggaggctggac

SEQ ID NO: 17516 - DNA, 25 bp, synthetic construct
  source 1..25: mol_type = other DNA; mol_type = other DNA
aagagtcacagtgtggagggctggg

SEQ ID NO: 17517 - DNA, 25 bp, synthetic construct
  source 1..25: mol_type = other DNA; mol_type = other DNA
aggagtcacaatgtgggaggctggg

SEQ ID NO: 17518 - DNA, 25 bp, synthetic construct
  source 1..25: mol_type = other DNA; mol_type = other DNA
aggagtcacagtgtagggagctggg

SEQ ID NO: 17519 - DNA, 25 bp, synthetic construct
  source 1..25: mol_type = other DNA; mol_type = other DNA
aggagtcacagtgtgagggactggg

SEQ ID NO: 17520 - DNA, 25 bp, synthetic construct
  source 1..25: mol_type = other DNA; mol_type = other DNA
aggagtcacagtgtggagggctgga

SEQ ID NO: 17521 - DNA, 25 bp, synthetic construct
  source 1..25: mol_type = other DNA; mol_type = other DNA
aaggagtcacagtgtggagggctgg

SEQ ID NO: 17522 - DNA, 25 bp, synthetic construct
  source 1..25: mol_type = other DNA; mol_type = other DNA
gaggagtcacagtgtaggaggctgg

SEQ ID NO: 17523 - DNA, 25 bp, synthetic construct
  source 1..25: mol_type = other DNA; mol_type = other DNA
gaggagtcacagtgtgagaggctgg

SEQ ID NO: 17524 - DNA, 25 bp, synthetic construct
  source 1..25: mol_type = other DNA; mol_type = other DNA
gaggagtcacagtgtgaggagctgg

SEQ ID NO: 17525 - DNA, 25 bp, synthetic construct
  source 1..25: mol_type = other DNA; mol_type = other DNA
gaggagtcacagtgtggaaggctgg

SEQ ID NO: 17526 - DNA, 25 bp, synthetic construct
  source 1..25: mol_type = other DNA; mol_type = other DNA
gaggagtcacagtgtggagagctgg

SEQ ID NO: 17527 - DNA, 25 bp, synthetic construct
  source 1..25: mol_type = other DNA; mol_type = other DNA
gaggagtcacagtgtggaggactgg

SEQ ID NO: 17528 - DNA, 25 bp, synthetic construct
  source 1..25: mol_type = other DNA; mol_type = other DNA
taaggagtcacagtgtggagggctg

SEQ ID NO: 17529 - DNA, 25 bp, synthetic construct
  source 1..25: mol_type = other DNA; mol_type = other DNA
tgaggagtcacagtgtaggaggctg

SEQ ID NO: 17530 - DNA, 25 bp, synthetic construct
  source 1..25: mol_type = other DNA; mol_type = other DNA
tgaggagtcacagtgtgagaggctg

SEQ ID NO: 17531 - DNA, 25 bp, synthetic construct
  source 1..25: mol_type = other DNA; mol_type = other DNA
tgaggagtcacagtgtgaggagctg

SEQ ID NO: 17532 - DNA, 25 bp, synthetic construct
  source 1..25: mol_type = other DNA; mol_type = other DNA
tgaggagtcacagtgtggaaggctg

SEQ ID NO: 17533 - DNA, 25 bp, synthetic construct
  source 1..25: mol_type = other DNA; mol_type = other DNA
tgaggagtcacagtgtggagagctg

SEQ ID NO: 17534 - DNA, 25 bp, synthetic construct
  source 1..25: mol_type = other DNA; mol_type = other DNA
tgaggagtcacagtgtggaggactg

SEQ ID NO: 17535 - DNA, 25 bp, synthetic construct
  source 1..25: mol_type = other DNA; mol_type = other DNA
gtaaggagtcacagtgtgggaggct

SEQ ID NO: 17536 - DNA, 25 bp, synthetic construct
  source 1..25: mol_type = other DNA; mol_type = other DNA
gtgaggaatcacagtgtgggaggct

SEQ ID NO: 17537 - DNA, 25 bp, synthetic construct
  source 1..25: mol_type = other DNA; mol_type = other DNA
gtgaggagtcacagtgtaggaggct

SEQ ID NO: 17538 - DNA, 25 bp, synthetic construct
  source 1..25: mol_type = other DNA; mol_type = other DNA
gtgaggagtcacagtgtgagaggct

SEQ ID NO: 17539 - DNA, 25 bp, synthetic construct
  source 1..25: mol_type = other DNA; mol_type = other DNA
gtgaggagtcacagtgtgaggagct

SEQ ID NO: 17540 - DNA, 25 bp, synthetic construct
  source 1..25: mol_type = other DNA; mol_type = other DNA
gtgaggagtcacagtgtggaggact

SEQ ID NO: 17541 - DNA, 25 bp, synthetic construct
  source 1..25: mol_type = other DNA; mol_type = other DNA
tatgaggagtcacagtgtggagggc

SEQ ID NO: 17542 - DNA, 25 bp, synthetic construct
  source 1..25: mol_type = other DNA; mol_type = other DNA
tgtgaagagtcacagtgtgggaggc

SEQ ID NO: 17543 - DNA, 25 bp, synthetic construct
  source 1..25: mol_type = other DNA; mol_type = other DNA
tgtgaggagtcacaatgtgggaggc

SEQ ID NO: 17544 - DNA, 25 bp, synthetic construct
  source 1..25: mol_type = other DNA; mol_type = other DNA
tgtgaggagtcacagtgtaggaggc

SEQ ID NO: 17545 - DNA, 25 bp, synthetic construct
  source 1..25: mol_type = other DNA; mol_type = other DNA
tgtgaggagtcacagtgtggaggac

SEQ ID NO: 17546 - DNA, 25 bp, synthetic construct
  source 1..25: mol_type = other DNA; mol_type = other DNA
atgtgaggagtcacagtgtggaggg

SEQ ID NO: 17547 - DNA, 25 bp, synthetic construct
  source 1..25: mol_type = other DNA; mol_type = other DNA
gtgtaaggagtcacagtgtggaggg

SEQ ID NO: 17548 - DNA, 25 bp, synthetic construct
  source 1..25: mol_type = other DNA; mol_type = other DNA
gtgtgagaagtcacagtgtggaggg

SEQ ID NO: 17549 - DNA, 25 bp, synthetic construct
  source 1..25: mol_type = other DNA; mol_type = other DNA
gtgtgaggagtcacaatgtggaggg

SEQ ID NO: 17550 - DNA, 25 bp, synthetic construct
  source 1..25: mol_type = other DNA; mol_type = other DNA
gtgtgaggagtcacagtgtaggagg

SEQ ID NO: 17551 - DNA, 25 bp, synthetic construct
  source 1..25: mol_type = other DNA; mol_type = other DNA
gtgtgaggagtcacagtgtggagga

SEQ ID NO: 17552 - DNA, 25 bp, synthetic construct
  source 1..25: mol_type = other DNA; mol_type = other DNA
aatgtgaggagtcacagtgtggagg

SEQ ID NO: 17553 - DNA, 25 bp, synthetic construct
  source 1..25: mol_type = other DNA; mol_type = other DNA
agtgtgaagagtcacagtgtggagg

SEQ ID NO: 17554 - DNA, 25 bp, synthetic construct
  source 1..25: mol_type = other DNA; mol_type = other DNA
agtgtgaggagtcacaatgtggagg

SEQ ID NO: 17555 - DNA, 25 bp, synthetic construct
  source 1..25: mol_type = other DNA; mol_type = other DNA
agtgtgaggagtcacagtgtaggag

SEQ ID NO: 17556 - DNA, 25 bp, synthetic construct
  source 1..25: mol_type = other DNA; mol_type = other DNA
agtgtgaggagtcacagtgtggaga

SEQ ID NO: 17557 - DNA, 25 bp, synthetic construct
  source 1..25: mol_type = other DNA
gagtgtgaggagtcacagtgtggga

SEQ ID NO: 17558 - DNA, 25 bp, synthetic construct
  source 1..25: mol_type = other DNA
gagtgtgaggagtcacagtgtggaa

SEQ ID NO: 17559 - DNA, 25 bp, synthetic construct
  source 1..25: mol_type = other DNA
tgagtgtgaggagtcacagtgtggg

SEQ ID NO: 17560 - DNA, 25 bp, synthetic construct
  source 1..25: mol_type = other DNA
tgagtgtgaggagtcacagtgtgga

SEQ ID NO: 17561 - DNA, 25 bp, synthetic construct
  source 1..25: mol_type = other DNA
tgagtgtgaggagtcacagtgtgaa

SEQ ID NO: 17562 - DNA, 25 bp, synthetic construct
  source 1..25: mol_type = other DNA
ctgagtgtgaggagtcacagtgtga

SEQ ID NO: 17563 - DNA, 25 bp, synthetic construct
  source 1..25: mol_type = other DNA
ctgagtgtgaggagtcacagtgtaa

SEQ ID NO: 17564 - DNA, 25 bp, synthetic construct
  source 1..25: mol_type = other DNA
gctgagtgtgaggagtcacagtgtg

SEQ ID NO: 17565 - DNA, 25 bp, synthetic construct
  source 1..25: mol_type = other DNA
gctgagtgtgaggagtcacagtgta

SEQ ID NO: 17566 - DNA, 25 bp, synthetic construct
  source 1..25: mol_type = other DNA
gctgagtgtgaggagtcacagtata

SEQ ID NO: 17567 - DNA, 25 bp, synthetic construct
  source 1..25: mol_type = other DNA
cgctgagtgtgaggagtcacagtgt

SEQ ID NO: 17568 - DNA, 25 bp, synthetic construct
  source 1..25: mol_type = other DNA
cgctgagtgtgaggagtcacagtat

SEQ ID NO: 17569 - DNA, 25 bp, synthetic construct
  source 1..25: mol_type = other DNA
cgctgagtgtgaggagtcacaatat

SEQ ID NO: 17570 - DNA, 25 bp, synthetic construct
  source 1..25: mol_type = other DNA
tcgctgagtgtgaggagtcacagta

SEQ ID NO: 17571 - DNA, 25 bp, synthetic construct
  source 1..25: mol_type = other DNA
tcgctgagtgtgaggagtcacaata

SEQ ID NO: 17572 - DNA, 25 bp, synthetic construct
  source 1..25: mol_type = other DNA
atcgctgagtgtgaggagtcacagt

SEQ ID NO: 17573 - DNA, 25 bp, synthetic construct
  source 1..25: mol_type = other DNA
atcgctgagtgtgaggagtcacaat

SEQ ID NO: 17574 - DNA, 25 bp, synthetic construct
  source 1..25: mol_type = other DNA
atcgctgagtgtgaggaatcacaat

SEQ ID NO: 17575 - DNA, 25 bp, synthetic construct
  source 1..25: mol_type = other DNA
catcgctgagtgtgaggagtcacag

SEQ ID NO: 17576 - DNA, 25 bp, synthetic construct
  source 1..25: mol_type = other DNA
catcgctgagtgtgaggagtcacaa

SEQ ID NO: 17577 - DNA, 25 bp, synthetic construct
  source 1..25: mol_type = other DNA
catcgctgagtgtgaggaatcacaa

SEQ ID NO: 17578 - DNA, 25 bp, synthetic construct
  source 1..25: mol_type = other DNA
tcatcgctgagtgtgaggaatcaca

SEQ ID NO: 17579 - DNA, 25 bp, synthetic construct
  source 1..25: mol_type = other DNA
tcatcgctgagtgtgagaaatcaca

SEQ ID NO: 17580 - DNA, 25 bp, synthetic construct
  source 1..25: mol_type = other DNA
gtcatcgctgagtgtgaggagtcac

SEQ ID NO: 17581 - DNA, 25 bp, synthetic construct
  source 1..25: mol_type = other DNA
gtcatcgctgagtgtgaggaatcac

SEQ ID NO: 17582 - DNA, 25 bp, synthetic construct
  source 1..25: mol_type = other DNA
gtcatcgctgagtgtgagaaatcac

SEQ ID NO: 17583 - DNA, 25 bp, synthetic construct
  source 1..25: mol_type = other DNA
ggtcatcgctgagtgtgaggagtca

SEQ ID NO: 17584 - DNA, 25 bp, synthetic construct
  source 1..25: mol_type = other DNA
ggtcatcgctgagtgtgaggaatca

SEQ ID NO: 17585 - DNA, 25 bp, synthetic construct
  source 1..25: mol_type = other DNA
ggtcatcgctgagtgtgagaaatca

SEQ ID NO: 17586 - DNA, 25 bp, synthetic construct
  source 1..25: mol_type = other DNA
aggtcatcgctgagtgtgaggaatc

SEQ ID NO: 17587 - DNA, 25 bp, synthetic construct
  source 1..25: mol_type = other DNA
aggtcatcgctgagtgtgagaaatc

SEQ ID NO: 17588 - DNA, 25 bp, synthetic construct
  source 1..25: mol_type = other DNA
caggtcatcgctgagtgtgaggagt

SEQ ID NO: 17589 - DNA, 25 bp, synthetic construct
  source 1..25: mol_type = other DNA
caggtcatcgctgagtgtgaggaat

SEQ ID NO: 17590 - DNA, 25 bp, synthetic construct
  source 1..25: mol_type = other DNA
caggtcatcgctgagtgtgagaaat

SEQ ID NO: 17591 - DNA, 25 bp, synthetic construct
  source 1..25: mol_type = other DNA
acaggtcatcgctgagtgtgaggag

SEQ ID NO: 17592 - DNA, 25 bp, synthetic construct
  source 1..25: mol_type = other DNA
acaggtcatcgctgagtgtgaggaa

SEQ ID NO: 17593 - DNA, 25 bp, synthetic construct
  source 1..25: mol_type = other DNA
acaggtcatcgctgagtgtgagaaa

SEQ ID NO: 17594 - DNA, 25 bp, synthetic construct
  source 1..25: mol_type = other DNA
cacaggtcatcgctgagtgtgagaa

SEQ ID NO: 17595 - DNA, 25 bp, synthetic construct
  source 1..25: mol_type = other DNA
cacaggtcatcgctgagtgtgaaaa

SEQ ID NO: 17596 - DNA, 25 bp, synthetic construct
  source 1..25: mol_type = other DNA
ccacaggtcatcgctgagtgtgagg

SEQ ID NO: 17597 - DNA, 25 bp, synthetic construct
  source 1..25: mol_type = other DNA
ccacaggtcatcgctgagtgtgaga

SEQ ID NO: 17598 - DNA, 25 bp, synthetic construct
  source 1..25: mol_type = other DNA
ccacaggtcatcgctgagtgtgaaa

SEQ ID NO: 17599 - DNA, 25 bp, synthetic construct
  source 1..25: mol_type = other DNA
cccacaggtcatcgctgagtgtgag

SEQ ID NO: 17600 - DNA, 25 bp, synthetic construct
  source 1..25: mol_type = other DNA
cccacaggtcatcgctgagtgtgaa

SEQ ID NO: 17601 - DNA, 25 bp, synthetic construct
  source 1..25: mol_type = other DNA
cccacaggtcatcgctgagtgtaaa

SEQ ID NO: 17602 - DNA, 25 bp, synthetic construct
  source 1..25: mol_type = other DNA
ccccacaggtcatcgctgagtgtaa

SEQ ID NO: 17603 - DNA, 25 bp, synthetic construct
  source 1..25: mol_type = other DNA
ccccacaggtcatcgctgagtataa

SEQ ID NO: 17604 - DNA, 25 bp, synthetic construct
  source 1..25: mol_type = other DNA
accccacaggtcatcgctgagtgtg

SEQ ID NO: 17605 - DNA, 25 bp, synthetic construct
  source 1..25: mol_type = other DNA
accccacaggtcatcgctgagtgta

SEQ ID NO: 17606 - DNA, 25 bp, synthetic construct
  source 1..25: mol_type = other DNA
accccacaggtcatcgctgagtata

SEQ ID NO: 17607 - DNA, 25 bp, synthetic construct
  source 1..25: mol_type = other DNA
caccccacaggtcatcgctgagtgt

SEQ ID NO: 17608 - DNA, 25 bp, synthetic construct
  source 1..25: mol_type = other DNA
caccccacaggtcatcgctgagtat

SEQ ID NO: 17609 - DNA, 25 bp, synthetic construct
  source 1..25: mol_type = other DNA
caccccacaggtcatcgctgaatat

SEQ ID NO: 17610 - DNA, 25 bp, synthetic construct
  source 1..25: mol_type = other DNA
ccaccccacaggtcatcgctgagta

SEQ ID NO: 17611 - DNA, 25 bp, synthetic construct
  source 1..25: mol_type = other DNA
ccaccccacaggtcatcgctgaata

SEQ ID NO: 17612 - DNA, 25 bp, synthetic construct
  source 1..25: mol_type = other DNA
cccaccccacaggtcatcgctgagt

SEQ ID NO: 17613 - DNA, 25 bp, synthetic construct
  source 1..25: mol_type = other DNA
cccaccccacaggtcatcgctgaat

SEQ ID NO: 17614 - DNA, 25 bp, synthetic construct
  source 1..25: mol_type = other DNA
cccaccccacaggtcatcgctaaat

SEQ ID NO: 17615 - DNA, 25 bp, synthetic construct
  source 1..25: mol_type = other DNA
ccccaccccacaggtcatcgctgag

SEQ ID NO: 17616 - DNA, 25 bp, synthetic construct
  source 1..25: mol_type = other DNA; mol_type = other DNA
ccccaccccacaggtcatcgctgaa

SEQ ID NO: 17617 - DNA, 25 bp, synthetic construct
  source 1..25: mol_type = other DNA
ccccaccccacaggtcatcgctaaa

SEQ ID NO: 17618 - DNA, 25 bp, synthetic construct
  source 1..25: mol_type = other DNA
cccccaccccacaggtcatcgctaa

SEQ ID NO: 17619 - DNA, 25 bp, synthetic construct
  source 1..25: mol_type = other DNA
cccccaccccacaggtcatcactaa

SEQ ID NO: 17620 - DNA, 25 bp, synthetic construct
  source 1..25: mol_type = other DNA; mol_type = other DNA
ccccccaccccacaggtcatcgctg

SEQ ID NO: 17621 - DNA, 25 bp, synthetic construct
  source 1..25: mol_type = other DNA; mol_type = other DNA
ccccccaccccacaggtcatcgcta

SEQ ID NO: 17622 - DNA, 25 bp, synthetic construct
  source 1..25: mol_type = other DNA; mol_type = other DNA
ccccccaccccacaggtcatcacta

SEQ ID NO: 17623 - DNA, 25 bp, synthetic construct
  source 1..25: mol_type = other DNA; mol_type = other DNA
gccccccaccccacaggtcatcgct

SEQ ID NO: 17624 - DNA, 25 bp, synthetic construct
  source 1..25: mol_type = other DNA; mol_type = other DNA
gccccccaccccacaggtcatcact

SEQ ID NO: 17625 - DNA, 25 bp, synthetic construct
  source 1..25: mol_type = other DNA
gccccccaccccacagatcatcact

SEQ ID NO: 17626 - DNA, 25 bp, synthetic construct
  source 1..25: mol_type = other DNA; mol_type = other DNA
ggccccccaccccacaggtcatcac

SEQ ID NO: 17627 - DNA, 25 bp, synthetic construct
  source 1..25: mol_type = other DNA; mol_type = other DNA
ggccccccaccccacagatcatcac

SEQ ID NO: 17628 - DNA, 25 bp, synthetic construct
  source 1..25: mol_type = other DNA; mol_type = other DNA
gggccccccaccccacaggtcatcg

SEQ ID NO: 17629 - DNA, 25 bp, synthetic construct
  source 1..25: mol_type = other DNA; mol_type = other DNA
gggccccccaccccacaggtcatca

SEQ ID NO: 17630 - DNA, 25 bp, synthetic construct
  source 1..25: mol_type = other DNA; mol_type = other DNA
gggccccccaccccacagatcatca

SEQ ID NO: 17631 - DNA, 25 bp, synthetic construct
  source 1..25: mol_type = other DNA; mol_type = other DNA
agggccccccaccccacaggtcatc

SEQ ID NO: 17632 - DNA, 25 bp, synthetic construct
  source 1..25: mol_type = other DNA; mol_type = other DNA
agggccccccaccccacagatcatc

SEQ ID NO: 17633 - DNA, 25 bp, synthetic construct
  source 1..25: mol_type = other DNA; mol_type = other DNA
agggccccccaccccacaaatcatc

SEQ ID NO: 17634 - DNA, 25 bp, synthetic construct
  source 1..25: mol_type = other DNA; mol_type = other DNA
cagggccccccaccccacagatcat

SEQ ID NO: 17635 - DNA, 25 bp, synthetic construct
  source 1..25: mol_type = other DNA; mol_type = other DNA
cagggccccccaccccacaaatcat

SEQ ID NO: 17636 - DNA, 25 bp, synthetic construct
  source 1..25: mol_type = other DNA; mol_type = other DNA
ccagggccccccaccccacaggtca

SEQ ID NO: 17637 - DNA, 25 bp, synthetic construct
  source 1..25: mol_type = other DNA; mol_type = other DNA
ccagggccccccaccccacagatca

SEQ ID NO: 17638 - DNA, 25 bp, synthetic construct
  source 1..25: mol_type = other DNA; mol_type = other DNA
ccagggccccccaccccacaaatca

SEQ ID NO: 17639 - DNA, 25 bp, synthetic construct
  source 1..25: mol_type = other DNA; mol_type = other DNA
cccagggccccccaccccacaggtc

SEQ ID NO: 17640 - DNA, 25 bp, synthetic construct
  source 1..25: mol_type = other DNA; mol_type = other DNA
cccagggccccccaccccacagatc

SEQ ID NO: 17641 - DNA, 25 bp, synthetic construct
  source 1..25: mol_type = other DNA; mol_type = other DNA
cccagggccccccaccccacaaatc

SEQ ID NO: 17642 - DNA, 25 bp, synthetic construct
  source 1..25: mol_type = other DNA; mol_type = other DNA
tcccagggccccccaccccacagat

SEQ ID NO: 17643 - DNA, 25 bp, synthetic construct
  source 1..25: mol_type = other DNA; mol_type = other DNA
tcccagggccccccaccccacaaat

SEQ ID NO: 17644 - DNA, 25 bp, synthetic construct
  source 1..25: mol_type = other DNA; mol_type = other DNA
gtcccagggccccccaccccacagg

SEQ ID NO: 17645 - DNA, 25 bp, synthetic construct
  source 1..25: mol_type = other DNA; mol_type = other DNA
gtcccagggccccccaccccacaga

SEQ ID NO: 17646 - DNA, 25 bp, synthetic construct
  source 1..25: mol_type = other DNA; mol_type = other DNA
gtcccagggccccccaccccacaaa

SEQ ID NO: 17647 - DNA, 25 bp, synthetic construct
  source 1..25: mol_type = other DNA; mol_type = other DNA
cgtcccagggccccccaccccacag

SEQ ID NO: 17648 - DNA, 25 bp, synthetic construct
  source 1..25: mol_type = other DNA; mol_type = other DNA
cgtcccagggccccccaccccacaa

SEQ ID NO: 17649 - DNA, 25 bp, synthetic construct
  source 1..25: mol_type = other DNA; mol_type = other DNA
cgtcccaggaccccccaccccacaa

SEQ ID NO: 17650 - DNA, 25 bp, synthetic construct
  source 1..25: mol_type = other DNA; mol_type = other DNA
acgtcccaggaccccccaccccaca

SEQ ID NO: 17651 - DNA, 25 bp, synthetic construct
  source 1..25: mol_type = other DNA; mol_type = other DNA
acgtcccagaaccccccaccccaca

SEQ ID NO: 17652 - DNA, 25 bp, synthetic construct
  source 1..25: mol_type = other DNA; mol_type = other DNA
aacgtcccagggccccccaccccac

SEQ ID NO: 17653 - DNA, 25 bp, synthetic construct
  source 1..25: mol_type = other DNA; mol_type = other DNA
aacgtcccaggaccccccaccccac

SEQ ID NO: 17654 - DNA, 25 bp, synthetic construct
  source 1..25: mol_type = other DNA; mol_type = other DNA
aacgtcccagaaccccccaccccac

SEQ ID NO: 17655 - DNA, 25 bp, synthetic construct
  source 1..25: mol_type = other DNA; mol_type = other DNA
aaacgtcccagggccccccacccca

SEQ ID NO: 17656 - DNA, 25 bp, synthetic construct
  source 1..25: mol_type = other DNA; mol_type = other DNA
aaacgtcccaggaccccccacccca

SEQ ID NO: 17657 - DNA, 25 bp, synthetic construct
  source 1..25: mol_type = other DNA; mol_type = other DNA
aaacgtcccagaaccccccacccca

SEQ ID NO: 17658 - DNA, 25 bp, synthetic construct
  source 1..25: mol_type = other DNA; mol_type = other DNA
aaaacgtcccaggaccccccacccc

SEQ ID NO: 17659 - DNA, 25 bp, synthetic construct
  source 1..25: mol_type = other DNA; mol_type = other DNA
aaaacgtcccagaaccccccacccc

SEQ ID NO: 17660 - DNA, 25 bp, synthetic construct
  source 1..25: mol_type = other DNA; mol_type = other DNA
aaaaacgtcccagggccccccaccc

SEQ ID NO: 17661 - DNA, 25 bp, synthetic construct
  source 1..25: mol_type = other DNA; mol_type = other DNA
aaaaacgtcccaggaccccccaccc

SEQ ID NO: 17662 - DNA, 25 bp, synthetic construct
  source 1..25: mol_type = other DNA; mol_type = other DNA
aaaaacgtcccagaaccccccaccc

SEQ ID NO: 17663 - DNA, 25 bp, synthetic construct
  source 1..25: mol_type = other DNA; mol_type = other DNA
actccaaaccctaggtttaaaaacg

SEQ ID NO: 17664 - DNA, 25 bp, synthetic construct
  source 1..25: mol_type = other DNA; mol_type = other DNA
actccaaaccctaggtttaaaaaca

SEQ ID NO: 17665 - DNA, 25 bp, synthetic construct
  source 1..25: mol_type = other DNA; mol_type = other DNA
actccaaaccctagatttaaaaaca

SEQ ID NO: 17666 - DNA, 25 bp, synthetic construct
  source 1..25: mol_type = other DNA; mol_type = other DNA
gactccaaaccctaggtttaaaaac

SEQ ID NO: 17667 - DNA, 25 bp, synthetic construct
  source 1..25: mol_type = other DNA; mol_type = other DNA
gactccaaaccctagatttaaaaac

SEQ ID NO: 17668 - DNA, 25 bp, synthetic construct
  source 1..25: mol_type = other DNA; mol_type = other DNA
gactccaaaccctaaatttaaaaac

SEQ ID NO: 17669 - DNA, 25 bp, synthetic construct
  source 1..25: mol_type = other DNA; mol_type = other DNA
agactccaaaccctagatttaaaaa

SEQ ID NO: 17670 - DNA, 25 bp, synthetic construct
  source 1..25: mol_type = other DNA; mol_type = other DNA
agactccaaaccctaaatttaaaaa

SEQ ID NO: 17671 - DNA, 25 bp, synthetic construct
  source 1..25: mol_type = other DNA; mol_type = other DNA
cagactccaaaccctaggtttaaaa

SEQ ID NO: 17672 - DNA, 25 bp, synthetic construct
  source 1..25: mol_type = other DNA; mol_type = other DNA
cagactccaaaccctagatttaaaa

SEQ ID NO: 17673 - DNA, 25 bp, synthetic construct
  source 1..25: mol_type = other DNA; mol_type = other DNA
cagactccaaaccctaaatttaaaa

SEQ ID NO: 17674 - DNA, 25 bp, synthetic construct
  source 1..25: mol_type = other DNA; mol_type = other DNA
ccagactccaaaccctaggtttaaa

SEQ ID NO: 17675 - DNA, 25 bp, synthetic construct
  source 1..25: mol_type = other DNA; mol_type = other DNA
ccagactccaaaccctagatttaaa

SEQ ID NO: 17676 - DNA, 25 bp, synthetic construct
  source 1..25: mol_type = other DNA; mol_type = other DNA
ccagactccaaaccctaaatttaaa

SEQ ID NO: 17677 - DNA, 25 bp, synthetic construct
  source 1..25: mol_type = other DNA; mol_type = other DNA
tccagactccaaaccctagatttaa

SEQ ID NO: 17678 - DNA, 25 bp, synthetic construct
  source 1..25: mol_type = other DNA; mol_type = other DNA
tccagactccaaaccctaaatttaa

SEQ ID NO: 17679 - DNA, 25 bp, synthetic construct
  source 1..25: mol_type = other DNA; mol_type = other DNA
gtccagactccaaaccctaggttta

SEQ ID NO: 17680 - DNA, 25 bp, synthetic construct
  source 1..25: mol_type = other DNA; mol_type = other DNA
gtccagactccaaaccctagattta

SEQ ID NO: 17681 - DNA, 25 bp, synthetic construct
  source 1..25: mol_type = other DNA; mol_type = other DNA
gtccagactccaaaccctaaattta

SEQ ID NO: 17682 - DNA, 25 bp, synthetic construct
  source 1..25: mol_type = other DNA; mol_type = other DNA
agtccagactccaaaccctaggttt

SEQ ID NO: 17683 - DNA, 25 bp, synthetic construct
  source 1..25: mol_type = other DNA; mol_type = other DNA
agtccagactccaaaccctagattt

SEQ ID NO: 17684 - DNA, 25 bp, synthetic construct
  source 1..25: mol_type = other DNA; mol_type = other DNA
agtccagactccaaaccctaaattt

SEQ ID NO: 17685 - DNA, 25 bp, synthetic construct
  source 1..25: mol_type = other DNA; mol_type = other DNA
tagtccagactccaaaccctagatt

SEQ ID NO: 17686 - DNA, 25 bp, synthetic construct
  source 1..25: mol_type = other DNA; mol_type = other DNA
tagtccagactccaaaccctaaatt

SEQ ID NO: 17687 - DNA, 25 bp, synthetic construct
  source 1..25: mol_type = other DNA; mol_type = other DNA
ttagtccagactccaaaccctaggt

SEQ ID NO: 17688 - DNA, 25 bp, synthetic construct
  source 1..25: mol_type = other DNA; mol_type = other DNA
ttagtccagactccaaaccctagat

SEQ ID NO: 17689 - DNA, 25 bp, synthetic construct
  source 1..25: mol_type = other DNA; mol_type = other DNA
ttagtccagactccaaaccctaaat

SEQ ID NO: 17690 - DNA, 25 bp, synthetic construct
  source 1..25: mol_type = other DNA; mol_type = other DNA
cttagtccagactccaaaccctagg

SEQ ID NO: 17691 - DNA, 25 bp, synthetic construct
  source 1..25: mol_type = other DNA; mol_type = other DNA
cttagtccagactccaaaccctaga

SEQ ID NO: 17692 - DNA, 25 bp, synthetic construct
  source 1..25: mol_type = other DNA; mol_type = other DNA
cttagtccagactccaaaccctaaa

SEQ ID NO: 17693 - DNA, 25 bp, synthetic construct
  source 1..25: mol_type = other DNA; mol_type = other DNA
gcttagtccagactccaaaccctaa

SEQ ID NO: 17694 - DNA, 25 bp, synthetic construct
  source 1..25: mol_type = other DNA; mol_type = other DNA
gcttagtccaaactccaaaccctaa

SEQ ID NO: 17695 - DNA, 25 bp, synthetic construct
  source 1..25: mol_type = other DNA; mol_type = other DNA
agcttagtccagactccaaacccta

SEQ ID NO: 17696 - DNA, 25 bp, synthetic construct
  source 1..25: mol_type = other DNA; mol_type = other DNA
agcttagtccaaactccaaacccta

SEQ ID NO: 17697 - DNA, 25 bp, synthetic construct
  source 1..25: mol_type = other DNA; mol_type = other DNA
agcttaatccaaactccaaacccta

SEQ ID NO: 17698 - DNA, 25 bp, synthetic construct
  source 1..25: mol_type = other DNA; mol_type = other DNA
gagcttagtccagactccaaaccct

SEQ ID NO: 17699 - DNA, 25 bp, synthetic construct
  source 1..25: mol_type = other DNA; mol_type = other DNA
gagcttagtccaaactccaaaccct

SEQ ID NO: 17700 - DNA, 25 bp, synthetic construct
  source 1..25: mol_type = other DNA; mol_type = other DNA
gagcttaatccaaactccaaaccct

SEQ ID NO: 17701 - DNA, 25 bp, synthetic construct
  source 1..25: mol_type = other DNA; mol_type = other DNA
ggagcttagtccaaactccaaaccc

SEQ ID NO: 17702 - DNA, 25 bp, synthetic construct
  source 1..25: mol_type = other DNA; mol_type = other DNA
ggagcttaatccaaactccaaaccc

SEQ ID NO: 17703 - DNA, 25 bp, synthetic construct
  source 1..25: mol_type = other DNA; mol_type = other DNA
tggagcttagtccagactccaaacc

SEQ ID NO: 17704 - DNA, 25 bp, synthetic construct
  source 1..25: mol_type = other DNA; mol_type = other DNA
tggagcttagtccaaactccaaacc

SEQ ID NO: 17705 - DNA, 25 bp, synthetic construct
  source 1..25: mol_type = other DNA; mol_type = other DNA
tggagcttaatccaaactccaaacc

SEQ ID NO: 17706 - DNA, 25 bp, synthetic construct
  source 1..25: mol_type = other DNA; mol_type = other DNA
atggagcttagtccagactccaaac

SEQ ID NO: 17707 - DNA, 25 bp, synthetic construct
  source 1..25: mol_type = other DNA; mol_type = other DNA
atggagcttagtccaaactccaaac

SEQ ID NO: 17708 - DNA, 25 bp, synthetic construct
  source 1..25: mol_type = other DNA; mol_type = other DNA
atggagcttaatccaaactccaaac

SEQ ID NO: 17709 - DNA, 25 bp, synthetic construct
  source 1..25: mol_type = other DNA; mol_type = other DNA
gatggagcttagtccaaactccaaa

SEQ ID NO: 17710 - DNA, 25 bp, synthetic construct
  source 1..25: mol_type = other DNA; mol_type = other DNA
gatggagcttaatccaaactccaaa

SEQ ID NO: 17711 - DNA, 25 bp, synthetic construct
  source 1..25: mol_type = other DNA; mol_type = other DNA
ggatggagcttagtccagactccaa

SEQ ID NO: 17712 - DNA, 25 bp, synthetic construct
  source 1..25: mol_type = other DNA; mol_type = other DNA
ggatggagcttagtccaaactccaa

SEQ ID NO: 17713 - DNA, 25 bp, synthetic construct
  source 1..25: mol_type = other DNA; mol_type = other DNA
ggatggagcttaatccaaactccaa

SEQ ID NO: 17714 - DNA, 25 bp, synthetic construct
  source 1..25: mol_type = other DNA; mol_type = other DNA
tggatggagcttagtccagactcca

SEQ ID NO: 17715 - DNA, 25 bp, synthetic construct
  source 1..25: mol_type = other DNA; mol_type = other DNA
tggatggagcttagtccaaactcca

SEQ ID NO: 17716 - DNA, 25 bp, synthetic construct
  source 1..25: mol_type = other DNA; mol_type = other DNA
tggatggagcttaatccaaactcca

SEQ ID NO: 17717 - DNA, 25 bp, synthetic construct
  source 1..25: mol_type = other DNA; mol_type = other DNA
gtggatggagcttagtccaaactcc

SEQ ID NO: 17718 - DNA, 25 bp, synthetic construct
  source 1..25: mol_type = other DNA; mol_type = other DNA
gtggatggagcttaatccaaactcc

SEQ ID NO: 17719 - DNA, 25 bp, synthetic construct
  source 1..25: mol_type = other DNA; mol_type = other DNA
cgtggatggagcttagtccagactc

SEQ ID NO: 17720 - DNA, 25 bp, synthetic construct
  source 1..25: mol_type = other DNA; mol_type = other DNA
cgtggatggagcttagtccaaactc

SEQ ID NO: 17721 - DNA, 25 bp, synthetic construct
  source 1..25: mol_type = other DNA; mol_type = other DNA
cgtggatggagcttaatccaaactc

SEQ ID NO: 17722 - DNA, 25 bp, synthetic construct
  source 1..25: mol_type = other DNA; mol_type = other DNA
acgtggatggagcttagtccagact

SEQ ID NO: 17723 - DNA, 25 bp, synthetic construct
  source 1..25: mol_type = other DNA; mol_type = other DNA
acgtggatggagcttagtccaaact

SEQ ID NO: 17724 - DNA, 25 bp, synthetic construct
  source 1..25: mol_type = other DNA; mol_type = other DNA
acgtggatggagcttaatccaaact

SEQ ID NO: 17725 - DNA, 25 bp, synthetic construct
  source 1..25: mol_type = other DNA; mol_type = other DNA
gacgtggatggagcttagtccaaac

SEQ ID NO: 17726 - DNA, 25 bp, synthetic construct
  source 1..25: mol_type = other DNA; mol_type = other DNA
gacgtggatggagcttaatccaaac

SEQ ID NO: 17727 - DNA, 25 bp, synthetic construct
  source 1..25: mol_type = other DNA; mol_type = other DNA
tgacgtggatggagcttagtccaga

SEQ ID NO: 17728 - DNA, 25 bp, synthetic construct
  source 1..25: mol_type = other DNA; mol_type = other DNA
tgacgtggatggagcttagtccaaa

SEQ ID NO: 17729 - DNA, 25 bp, synthetic construct
  source 1..25: mol_type = other DNA; mol_type = other DNA
tgacgtggatggagcttaatccaaa

SEQ ID NO: 17730 - DNA, 25 bp, synthetic construct
  source 1..25: mol_type = other DNA; mol_type = other DNA
gtgacgtggatggagcttagtccag

SEQ ID NO: 17731 - DNA, 25 bp, synthetic construct
  source 1..25: mol_type = other DNA; mol_type = other DNA
gtgacgtggatggagcttagtccaa

SEQ ID NO: 17732 - DNA, 25 bp, synthetic construct
  source 1..25: mol_type = other DNA; mol_type = other DNA
gtgacgtggatggagcttaatccaa

SEQ ID NO: 17733 - DNA, 25 bp, synthetic construct
  source 1..25: mol_type = other DNA; mol_type = other DNA
agtgacgtggatggagcttaatcca

SEQ ID NO: 17734 - DNA, 25 bp, synthetic construct
  source 1..25: mol_type = other DNA; mol_type = other DNA
agtgacgtggatggaacttaatcca

SEQ ID NO: 17735 - DNA, 25 bp, synthetic construct
  source 1..25: mol_type = other DNA; mol_type = other DNA
gagtgacgtggatggagcttagtcc

SEQ ID NO: 17736 - DNA, 25 bp, synthetic construct
  source 1..25: mol_type = other DNA; mol_type = other DNA
gagtgacgtggatggagcttaatcc

SEQ ID NO: 17737 - DNA, 25 bp, synthetic construct
  source 1..25: mol_type = other DNA; mol_type = other DNA
gagtgacgtggatggaacttaatcc

SEQ ID NO: 17738 - DNA, 25 bp, synthetic construct
  source 1..25: mol_type = other DNA; mol_type = other DNA
tgagtgacgtggatggagcttagtc

SEQ ID NO: 17739 - DNA, 25 bp, synthetic construct
  source 1..25: mol_type = other DNA; mol_type = other DNA
tgagtgacgtggatggagcttaatc

SEQ ID NO: 17740 - DNA, 25 bp, synthetic construct
  source 1..25: mol_type = other DNA; mol_type = other DNA
tgagtgacgtggatggaacttaatc

SEQ ID NO: 17741 - DNA, 25 bp, synthetic construct
  source 1..25: mol_type = other DNA; mol_type = other DNA
gtgagtgacgtggatggagcttaat

SEQ ID NO: 17742 - DNA, 25 bp, synthetic construct
  source 1..25: mol_type = other DNA; mol_type = other DNA
gtgagtgacgtggatggaacttaat

SEQ ID NO: 17743 - DNA, 25 bp, synthetic construct
  source 1..25: mol_type = other DNA; mol_type = other DNA
tgtgagtgacgtggatggagcttag

SEQ ID NO: 17744 - DNA, 25 bp, synthetic construct
  source 1..25: mol_type = other DNA; mol_type = other DNA
tgtgagtgacgtggatggagcttaa

SEQ ID NO: 17745 - DNA, 25 bp, synthetic construct
  source 1..25: mol_type = other DNA; mol_type = other DNA
tgtgagtgacgtggatggaacttaa

SEQ ID NO: 17746 - DNA, 25 bp, synthetic construct
  source 1..25: mol_type = other DNA; mol_type = other DNA
ttgtgagtgacgtggatggagctta

SEQ ID NO: 17747 - DNA, 25 bp, synthetic construct
  source 1..25: mol_type = other DNA; mol_type = other DNA
ttgtgagtgacgtggatggaactta

SEQ ID NO: 17748 - DNA, 25 bp, synthetic construct
  source 1..25: mol_type = other DNA; mol_type = other DNA
ttgtgagtgacgtggatgaaactta

SEQ ID NO: 17749 - DNA, 25 bp, synthetic construct
  source 1..25: mol_type = other DNA; mol_type = other DNA
cttgtgagtgacgtggatggaactt

SEQ ID NO: 17750 - DNA, 25 bp, synthetic construct
  source 1..25: mol_type = other DNA; mol_type = other DNA
cttgtgagtgacgtggatgaaactt

SEQ ID NO: 17751 - DNA, 25 bp, synthetic construct
  source 1..25: mol_type = other DNA; mol_type = other DNA
acttgtgagtgacgtggatggagct

SEQ ID NO: 17752 - DNA, 25 bp, synthetic construct
  source 1..25: mol_type = other DNA; mol_type = other DNA
acttgtgagtgacgtggatggaact

SEQ ID NO: 17753 - DNA, 25 bp, synthetic construct
  source 1..25: mol_type = other DNA; mol_type = other DNA
acttgtgagtgacgtggatgaaact

SEQ ID NO: 17754 - DNA, 25 bp, synthetic construct
  source 1..25: mol_type = other DNA; mol_type = other DNA
aacttgtgagtgacgtggatggagc

SEQ ID NO: 17755 - DNA, 25 bp, synthetic construct
  source 1..25: mol_type = other DNA; mol_type = other DNA
aacttgtgagtgacgtggatggaac

SEQ ID NO: 17756 - DNA, 25 bp, synthetic construct
  source 1..25: mol_type = other DNA; mol_type = other DNA
aacttgtgagtgacgtggatgaaac

SEQ ID NO: 17757 - DNA, 25 bp, synthetic construct
  source 1..25: mol_type = other DNA; mol_type = other DNA
aaacttgtgagtgacgtggatggaa

SEQ ID NO: 17758 - DNA, 25 bp, synthetic construct
  source 1..25: mol_type = other DNA; mol_type = other DNA
aaacttgtgagtgacgtggatgaaa

SEQ ID NO: 17759 - DNA, 25 bp, synthetic construct
  source 1..25: mol_type = other DNA; mol_type = other DNA
gaaacttgtgagtgacgtggatgga

SEQ ID NO: 17760 - DNA, 25 bp, synthetic construct
  source 1..25: mol_type = other DNA; mol_type = other DNA
gaaacttgtgagtgacgtggatgaa

SEQ ID NO: 17761 - DNA, 25 bp, synthetic construct
  source 1..25: mol_type = other DNA; mol_type = other DNA
gaaacttgtgagtgacgtggataaa

SEQ ID NO: 17762 - DNA, 25 bp, synthetic construct
  source 1..25: mol_type = other DNA; mol_type = other DNA
agaaacttgtgagtgacgtggatgg

SEQ ID NO: 17763 - DNA, 25 bp, synthetic construct
  source 1..25: mol_type = other DNA; mol_type = other DNA
agaaacttgtgagtgacgtggatga

SEQ ID NO: 17764 - DNA, 25 bp, synthetic construct
  source 1..25: mol_type = other DNA; mol_type = other DNA
agaaacttgtgagtgacgtggataa

SEQ ID NO: 17765 - DNA, 25 bp, synthetic construct
  source 1..25: mol_type = other DNA; mol_type = other DNA
cagaaacttgtgagtgacgtggata

SEQ ID NO: 17766 - DNA, 25 bp, synthetic construct
  source 1..25: mol_type = other DNA; mol_type = other DNA
cagaaacttgtgagtgacgtgaata

SEQ ID NO: 17767 - DNA, 25 bp, synthetic construct
  source 1..25: mol_type = other DNA; mol_type = other DNA
acagaaacttgtgagtgacgtggat

SEQ ID NO: 17768 - DNA, 25 bp, synthetic construct
  source 1..25: mol_type = other DNA; mol_type = other DNA
acagaaacttgtgagtgacgtgaat

SEQ ID NO: 17769 - DNA, 25 bp, synthetic construct
  source 1..25: mol_type = other DNA; mol_type = other DNA
acagaaacttgtgagtgacgtaaat

SEQ ID NO: 17770 - DNA, 25 bp, synthetic construct
  source 1..25: mol_type = other DNA; mol_type = other DNA
aacagaaacttgtgagtgacgtgga

SEQ ID NO: 17771 - DNA, 25 bp, synthetic construct
  source 1..25: mol_type = other DNA; mol_type = other DNA
aacagaaacttgtgagtgacgtgaa

SEQ ID NO: 17772 - DNA, 25 bp, synthetic construct
  source 1..25: mol_type = other DNA; mol_type = other DNA
aacagaaacttgtgagtgacgtaaa

SEQ ID NO: 17773 - DNA, 25 bp, synthetic construct
  source 1..25: mol_type = other DNA; mol_type = other DNA
aaacagaaacttgtgagtgacgtga

SEQ ID NO: 17774 - DNA, 25 bp, synthetic construct
  source 1..25: mol_type = other DNA; mol_type = other DNA
aaacagaaacttgtgagtgacgtaa

SEQ ID NO: 17775 - DNA, 25 bp, synthetic construct
  source 1..25: mol_type = other DNA; mol_type = other DNA
taaacagaaacttgtgagtgacgtg

SEQ ID NO: 17776 - DNA, 25 bp, synthetic construct
  source 1..25: mol_type = other DNA; mol_type = other DNA
taaacagaaacttgtgagtgacgta

SEQ ID NO: 17777 - DNA, 25 bp, synthetic construct
  source 1..25: mol_type = other DNA; mol_type = other DNA
taaacagaaacttgtgagtgacata

SEQ ID NO: 17778 - DNA, 25 bp, synthetic construct
  source 1..25: mol_type = other DNA; mol_type = other DNA
ataaacagaaacttgtgagtgacgt

SEQ ID NO: 17779 - DNA, 25 bp, synthetic construct
  source 1..25: mol_type = other DNA; mol_type = other DNA
ataaacagaaacttgtgagtgacat

SEQ ID NO: 17780 - DNA, 25 bp, synthetic construct
  source 1..25: mol_type = other DNA; mol_type = other DNA
ataaacagaaacttgtgagtaacat

SEQ ID NO: 17781 - DNA, 25 bp, synthetic construct
  source 1..25: mol_type = other DNA; mol_type = other DNA
tataaacagaaacttgtgagtgaca

SEQ ID NO: 17782 - DNA, 25 bp, synthetic construct
  source 1..25: mol_type = other DNA; mol_type = other DNA
tataaacagaaacttgtgagtaaca

SEQ ID NO: 17783 - DNA, 25 bp, synthetic construct
  source 1..25: mol_type = other DNA; mol_type = other DNA
atataaacagaaacttgtgagtgac

SEQ ID NO: 17784 - DNA, 25 bp, synthetic construct
  source 1..25: mol_type = other DNA; mol_type = other DNA
atataaacagaaacttgtgagtaac

SEQ ID NO: 17785 - DNA, 25 bp, synthetic construct
  source 1..25: mol_type = other DNA; mol_type = other DNA
atataaacagaaacttgtgaataac

SEQ ID NO: 17786 - DNA, 25 bp, synthetic construct
  source 1..25: mol_type = other DNA; mol_type = other DNA
aatataaacagaaacttgtgagtga

SEQ ID NO: 17787 - DNA, 25 bp, synthetic construct
  source 1..25: mol_type = other DNA; mol_type = other DNA
aatataaacagaaacttgtgagtaa

SEQ ID NO: 17788 - DNA, 25 bp, synthetic construct
  source 1..25: mol_type = other DNA; mol_type = other DNA
aatataaacagaaacttgtgaataa

SEQ ID NO: 17789 - DNA, 25 bp, synthetic construct
  source 1..25: mol_type = other DNA; mol_type = other DNA
aaatataaacagaaacttgtgagta

SEQ ID NO: 17790 - DNA, 25 bp, synthetic construct
  source 1..25: mol_type = other DNA; mol_type = other DNA
aaatataaacagaaacttgtgaata

SEQ ID NO: 17791 - DNA, 25 bp, synthetic construct
  source 1..25: mol_type = other DNA; mol_type = other DNA
gaaatataaacagaaacttgtgagt

SEQ ID NO: 17792 - DNA, 25 bp, synthetic construct
  source 1..25: mol_type = other DNA; mol_type = other DNA
gaaatataaacagaaacttgtgaat

SEQ ID NO: 17793 - DNA, 25 bp, synthetic construct
  source 1..25: mol_type = other DNA; mol_type = other DNA
gaaatataaacagaaacttgtaaat

SEQ ID NO: 17794 - DNA, 25 bp, synthetic construct
  source 1..25: mol_type = other DNA; mol_type = other DNA
agaaatataaacagaaacttgtgag

SEQ ID NO: 17795 - DNA, 25 bp, synthetic construct
  source 1..25: mol_type = other DNA; mol_type = other DNA
agaaatataaacagaaacttgtgaa

SEQ ID NO: 17796 - DNA, 25 bp, synthetic construct
  source 1..25: mol_type = other DNA; mol_type = other DNA
agaaatataaacagaaacttgtaaa

SEQ ID NO: 17797 - DNA, 25 bp, synthetic construct
  source 1..25: mol_type = other DNA; mol_type = other DNA
tagaaatataaacagaaacttgtaa

SEQ ID NO: 17798 - DNA, 25 bp, synthetic construct
  source 1..25: mol_type = other DNA; mol_type = other DNA
tagaaatataaacagaaacttataa

SEQ ID NO: 17799 - DNA, 25 bp, synthetic construct
  source 1..25: mol_type = other DNA; mol_type = other DNA
ctagaaatataaacagaaacttgtg

SEQ ID NO: 17800 - DNA, 25 bp, synthetic construct
  source 1..25: mol_type = other DNA; mol_type = other DNA
ctagaaatataaacagaaacttgta

SEQ ID NO: 17801 - DNA, 25 bp, synthetic construct
  source 1..25: mol_type = other DNA; mol_type = other DNA
ctagaaatataaacagaaacttata

SEQ ID NO: 17802 - DNA, 25 bp, synthetic construct
  source 1..25: mol_type = other DNA; mol_type = other DNA
gctagaaatataaacagaaacttgt

SEQ ID NO: 17803 - DNA, 25 bp, synthetic construct
  source 1..25: mol_type = other DNA; mol_type = other DNA
gctagaaatataaacagaaacttat

SEQ ID NO: 17804 - DNA, 25 bp, synthetic construct
  source 1..25: mol_type = other DNA; mol_type = other DNA
gctagaaatataaacaaaaacttat

SEQ ID NO: 17805 - DNA, 25 bp, synthetic construct
  source 1..25: mol_type = other DNA; mol_type = other DNA
agctagaaatataaacagaaactta

SEQ ID NO: 17806 - DNA, 25 bp, synthetic construct
  source 1..25: mol_type = other DNA; mol_type = other DNA
agctagaaatataaacaaaaactta

SEQ ID NO: 17807 - DNA, 25 bp, synthetic construct
  source 1..25: mol_type = other DNA; mol_type = other DNA
aagctagaaatataaacagaaactt

SEQ ID NO: 17808 - DNA, 25 bp, synthetic construct
  source 1..25: mol_type = other DNA; mol_type = other DNA
aagctagaaatataaacaaaaactt

SEQ ID NO: 17809 - DNA, 25 bp, synthetic construct
  source 1..25: mol_type = other DNA; mol_type = other DNA
aagctaaaaatataaacaaaaactt

SEQ ID NO: 17810 - DNA, 25 bp, synthetic construct
  source 1..25: mol_type = other DNA; mol_type = other DNA
aaagctagaaatataaacagaaact

SEQ ID NO: 17811 - DNA, 25 bp, synthetic construct
  source 1..25: mol_type = other DNA; mol_type = other DNA
aaagctagaaatataaacaaaaact

SEQ ID NO: 17812 - DNA, 25 bp, synthetic construct
  source 1..25: mol_type = other DNA; mol_type = other DNA
aaagctaaaaatataaacaaaaact

SEQ ID NO: 17813 - DNA, 25 bp, synthetic construct
  source 1..25: mol_type = other DNA; mol_type = other DNA
aaaagctagaaatataaacaaaaac

SEQ ID NO: 17814 - DNA, 25 bp, synthetic construct
  source 1..25: mol_type = other DNA; mol_type = other DNA
aaaagctaaaaatataaacaaaaac

SEQ ID NO: 17815 - DNA, 25 bp, synthetic construct
  source 1..25: mol_type = other DNA; mol_type = other DNA
aaaaagctagaaatataaacagaaa

SEQ ID NO: 17816 - DNA, 25 bp, synthetic construct
  source 1..25: mol_type = other DNA; mol_type = other DNA
aaaaagctagaaatataaacaaaaa

SEQ ID NO: 17817 - DNA, 25 bp, synthetic construct
  source 1..25: mol_type = other DNA; mol_type = other DNA
aaaaagctaaaaatataaacaaaaa

SEQ ID NO: 17818 - DNA, 25 bp, synthetic construct
  source 1..25: mol_type = other DNA; mol_type = other DNA
aaaaaagctagaaatataaacagaa

SEQ ID NO: 17819 - DNA, 25 bp, synthetic construct
  source 1..25: mol_type = other DNA; mol_type = other DNA
aaaaaagctagaaatataaacaaaa

SEQ ID NO: 17820 - DNA, 25 bp, synthetic construct
  source 1..25: mol_type = other DNA; mol_type = other DNA
aaaaaagctaaaaatataaacaaaa

SEQ ID NO: 17821 - DNA, 25 bp, synthetic construct
  source 1..25: mol_type = other DNA; mol_type = other DNA
aaaaaaagctagaaatataaacaaa

SEQ ID NO: 17822 - DNA, 25 bp, synthetic construct
  source 1..25: mol_type = other DNA; mol_type = other DNA
aaaaaaagctaaaaatataaacaaa

SEQ ID NO: 17823 - DNA, 25 bp, synthetic construct
  source 1..25: mol_type = other DNA; mol_type = other DNA
taaaaaaagctagaaatataaacag

SEQ ID NO: 17824 - DNA, 25 bp, synthetic construct
  source 1..25: mol_type = other DNA; mol_type = other DNA
taaaaaaagctagaaatataaacaa

SEQ ID NO: 17825 - DNA, 25 bp, synthetic construct
  source 1..25: mol_type = other DNA; mol_type = other DNA
taaaaaaagctaaaaatataaacaa

SEQ ID NO: 17826 - DNA, 25 bp, synthetic construct
  source 1..25: mol_type = other DNA; mol_type = other DNA
ttaaaaaaagctagaaatataaaca

SEQ ID NO: 17827 - DNA, 25 bp, synthetic construct
  source 1..25: mol_type = other DNA; mol_type = other DNA
ttaaaaaaagctaaaaatataaaca

SEQ ID NO: 17828 - DNA, 25 bp, synthetic construct
  source 1..25: mol_type = other DNA; mol_type = other DNA
ttaaaaaaaactaaaaatataaaca

SEQ ID NO: 17829 - DNA, 25 bp, synthetic construct
  source 1..25: mol_type = other DNA; mol_type = other DNA
attaaaaaaagctaaaaatataaac

SEQ ID NO: 17830 - DNA, 25 bp, synthetic construct
  source 1..25: mol_type = other DNA; mol_type = other DNA
attaaaaaaaactaaaaatataaac

SEQ ID NO: 17831 - DNA, 25 bp, synthetic construct
  source 1..25: mol_type = other DNA; mol_type = other DNA
gtgagtgtgagaccgagtgtgtatg

SEQ ID NO: 17832 - DNA, 25 bp, synthetic construct
  source 1..25: mol_type = other DNA; mol_type = other DNA
gtgagtgtgagaccgagtgtgtata

SEQ ID NO: 17833 - DNA, 25 bp, synthetic construct
  source 1..25: mol_type = other DNA; mol_type = other DNA
gtgagtgtgagaccgagtgtatata

SEQ ID NO: 17834 - DNA, 25 bp, synthetic construct
  source 1..25: mol_type = other DNA; mol_type = other DNA
ggtgagtgtgagaccgagtgtatat

SEQ ID NO: 17835 - DNA, 25 bp, synthetic construct
  source 1..25: mol_type = other DNA; mol_type = other DNA
ggtgagtgtgagaccgagtatatat

SEQ ID NO: 17836 - DNA, 25 bp, synthetic construct
  source 1..25: mol_type = other DNA; mol_type = other DNA
aggtgagtgtgagaccgagtgtgta

SEQ ID NO: 17837 - DNA, 25 bp, synthetic construct
  source 1..25: mol_type = other DNA; mol_type = other DNA
aggtgagtgtgagaccgagtgtata

SEQ ID NO: 17838 - DNA, 25 bp, synthetic construct
  source 1..25: mol_type = other DNA; mol_type = other DNA
aggtgagtgtgagaccgagtatata

SEQ ID NO: 17839 - DNA, 25 bp, synthetic construct
  source 1..25: mol_type = other DNA; mol_type = other DNA
caggtgagtgtgagaccgagtgtgt

SEQ ID NO: 17840 - DNA, 25 bp, synthetic construct
  source 1..25: mol_type = other DNA; mol_type = other DNA
caggtgagtgtgagaccgagtgtat

SEQ ID NO: 17841 - DNA, 25 bp, synthetic construct
  source 1..25: mol_type = other DNA; mol_type = other DNA
caggtgagtgtgagaccgagtatat

SEQ ID NO: 17842 - DNA, 25 bp, synthetic construct
  source 1..25: mol_type = other DNA; mol_type = other DNA
acaggtgagtgtgagaccgagtgta

SEQ ID NO: 17843 - DNA, 25 bp, synthetic construct
  source 1..25: mol_type = other DNA; mol_type = other DNA
acaggtgagtgtgagaccgagtata

SEQ ID NO: 17844 - DNA, 25 bp, synthetic construct
  source 1..25: mol_type = other DNA; mol_type = other DNA
cacaggtgagtgtgagaccgagtgt

SEQ ID NO: 17845 - DNA, 25 bp, synthetic construct
  source 1..25: mol_type = other DNA; mol_type = other DNA
cacaggtgagtgtgagaccgagtat

SEQ ID NO: 17846 - DNA, 25 bp, synthetic construct
  source 1..25: mol_type = other DNA; mol_type = other DNA
cacaggtgagtgtgagaccgaatat

SEQ ID NO: 17847 - DNA, 25 bp, synthetic construct
  source 1..25: mol_type = other DNA; mol_type = other DNA
ccacaggtgagtgtgagaccgagtg

SEQ ID NO: 17848 - DNA, 25 bp, synthetic construct
  source 1..25: mol_type = other DNA; mol_type = other DNA
ccacaggtgagtgtgagaccgagta

SEQ ID NO: 17849 - DNA, 25 bp, synthetic construct
  source 1..25: mol_type = other DNA; mol_type = other DNA
ccacaggtgagtgtgagaccgaata

SEQ ID NO: 17850 - DNA, 25 bp, synthetic construct
  source 1..25: mol_type = other DNA; mol_type = other DNA
cccacaggtgagtgtgagaccgaat

SEQ ID NO: 17851 - DNA, 25 bp, synthetic construct
  source 1..25: mol_type = other DNA; mol_type = other DNA
cccacaggtgagtgtgagaccaaat

SEQ ID NO: 17852 - DNA, 25 bp, synthetic construct
  source 1..25: mol_type = other DNA; mol_type = other DNA
acccacaggtgagtgtgagaccgag

SEQ ID NO: 17853 - DNA, 25 bp, synthetic construct
  source 1..25: mol_type = other DNA; mol_type = other DNA
acccacaggtgagtgtgagaccgaa

SEQ ID NO: 17854 - DNA, 25 bp, synthetic construct
  source 1..25: mol_type = other DNA; mol_type = other DNA
acccacaggtgagtgtgagaccaaa

SEQ ID NO: 17855 - DNA, 25 bp, synthetic construct
  source 1..25: mol_type = other DNA; mol_type = other DNA
aacccacaggtgagtgtgagaccga

SEQ ID NO: 17856 - DNA, 25 bp, synthetic construct
  source 1..25: mol_type = other DNA; mol_type = other DNA
aacccacaggtgagtgtgagaccaa

SEQ ID NO: 17857 - DNA, 25 bp, synthetic construct
  source 1..25: mol_type = other DNA; mol_type = other DNA
aacccacaggtgagtgtgaaaccaa

SEQ ID NO: 17858 - DNA, 25 bp, synthetic construct
  source 1..25: mol_type = other DNA; mol_type = other DNA
aaacccacaggtgagtgtgagacca

SEQ ID NO: 17859 - DNA, 25 bp, synthetic construct
  source 1..25: mol_type = other DNA; mol_type = other DNA
aaacccacaggtgagtgtgaaacca

SEQ ID NO: 17860 - DNA, 25 bp, synthetic construct
  source 1..25: mol_type = other DNA; mol_type = other DNA
aaaacccacaggtgagtgtgagacc

SEQ ID NO: 17861 - DNA, 25 bp, synthetic construct
  source 1..25: mol_type = other DNA; mol_type = other DNA
aaaacccacaggtgagtgtgaaacc

SEQ ID NO: 17862 - DNA, 25 bp, synthetic construct
  source 1..25: mol_type = other DNA; mol_type = other DNA
aaaacccacaggtgagtgtaaaacc

SEQ ID NO: 17863 - DNA, 25 bp, synthetic construct
  source 1..25: mol_type = other DNA; mol_type = other DNA
caaaacccacaggtgagtgtgagac

SEQ ID NO: 17864 - DNA, 25 bp, synthetic construct
  source 1..25: mol_type = other DNA; mol_type = other DNA
caaaacccacaggtgagtgtgaaac

SEQ ID NO: 17865 - DNA, 25 bp, synthetic construct
  source 1..25: mol_type = other DNA; mol_type = other DNA
caaaacccacaggtgagtgtaaaac

SEQ ID NO: 17866 - DNA, 25 bp, synthetic construct
  source 1..25: mol_type = other DNA; mol_type = other DNA
ccaaaacccacaggtgagtgtgaaa

SEQ ID NO: 17867 - DNA, 25 bp, synthetic construct
  source 1..25: mol_type = other DNA; mol_type = other DNA
ccaaaacccacaggtgagtgtaaaa

SEQ ID NO: 17868 - DNA, 25 bp, synthetic construct
  source 1..25: mol_type = other DNA; mol_type = other DNA
accaaaacccacaggtgagtgtgag

SEQ ID NO: 17869 - DNA, 25 bp, synthetic construct
  source 1..25: mol_type = other DNA; mol_type = other DNA
accaaaacccacaggtgagtgtgaa

SEQ ID NO: 17870 - DNA, 25 bp, synthetic construct
  source 1..25: mol_type = other DNA; mol_type = other DNA
accaaaacccacaggtgagtgtaaa

SEQ ID NO: 17871 - DNA, 25 bp, synthetic construct
  source 1..25: mol_type = other DNA; mol_type = other DNA
aaccaaaacccacaggtgagtgtga

SEQ ID NO: 17872 - DNA, 25 bp, synthetic construct
  source 1..25: mol_type = other DNA; mol_type = other DNA
aaccaaaacccacaggtgagtgtaa

SEQ ID NO: 17873 - DNA, 25 bp, synthetic construct
  source 1..25: mol_type = other DNA; mol_type = other DNA
aaccaaaacccacaggtgagtataa

SEQ ID NO: 17874 - DNA, 25 bp, synthetic construct
  source 1..25: mol_type = other DNA; mol_type = other DNA
gaaccaaaacccacaggtgagtgta

SEQ ID NO: 17875 - DNA, 25 bp, synthetic construct
  source 1..25: mol_type = other DNA; mol_type = other DNA
gaaccaaaacccacaggtgagtata

SEQ ID NO: 17876 - DNA, 25 bp, synthetic construct
  source 1..25: mol_type = other DNA; mol_type = other DNA
ggaaccaaaacccacaggtgagtgt

SEQ ID NO: 17877 - DNA, 25 bp, synthetic construct
  source 1..25: mol_type = other DNA; mol_type = other DNA
ggaaccaaaacccacaggtgagtat

SEQ ID NO: 17878 - DNA, 25 bp, synthetic construct
  source 1..25: mol_type = other DNA; mol_type = other DNA
ggaaccaaaacccacaggtgaatat

SEQ ID NO: 17879 - DNA, 25 bp, synthetic construct
  source 1..25: mol_type = other DNA; mol_type = other DNA
cggaaccaaaacccacaggtgagtg

SEQ ID NO: 17880 - DNA, 25 bp, synthetic construct
  source 1..25: mol_type = other DNA; mol_type = other DNA
cggaaccaaaacccacaggtgagta

SEQ ID NO: 17881 - DNA, 25 bp, synthetic construct
  source 1..25: mol_type = other DNA; mol_type = other DNA
cggaaccaaaacccacaggtgaata

SEQ ID NO: 17882 - DNA, 25 bp, synthetic construct
  source 1..25: mol_type = other DNA; mol_type = other DNA
acggaaccaaaacccacaggtgaat

SEQ ID NO: 17883 - DNA, 25 bp, synthetic construct
  source 1..25: mol_type = other DNA; mol_type = other DNA
acggaaccaaaacccacaggtaaat

SEQ ID NO: 17884 - DNA, 25 bp, synthetic construct
  source 1..25: mol_type = other DNA; mol_type = other DNA
aacggaaccaaaacccacaggtgag

SEQ ID NO: 17885 - DNA, 25 bp, synthetic construct
  source 1..25: mol_type = other DNA; mol_type = other DNA
aacggaaccaaaacccacaggtgaa

SEQ ID NO: 17886 - DNA, 25 bp, synthetic construct
  source 1..25: mol_type = other DNA; mol_type = other DNA
aacggaaccaaaacccacaggtaaa

SEQ ID NO: 17887 - DNA, 25 bp, synthetic construct
  source 1..25: mol_type = other DNA; mol_type = other DNA
gaacggaaccaaaacccacaggtga

SEQ ID NO: 17888 - DNA, 25 bp, synthetic construct
  source 1..25: mol_type = other DNA; mol_type = other DNA
gaacggaaccaaaacccacaggtaa

SEQ ID NO: 17889 - DNA, 25 bp, synthetic construct
  source 1..25: mol_type = other DNA; mol_type = other DNA
gaacggaaccaaaacccacagataa

SEQ ID NO: 17890 - DNA, 25 bp, synthetic construct
  source 1..25: mol_type = other DNA; mol_type = other DNA
tgaacggaaccaaaacccacaggta

SEQ ID NO: 17891 - DNA, 25 bp, synthetic construct
  source 1..25: mol_type = other DNA; mol_type = other DNA
tgaacggaaccaaaacccacagata

SEQ ID NO: 17892 - DNA, 25 bp, synthetic construct
  source 1..25: mol_type = other DNA; mol_type = other DNA
ttgaacggaaccaaaacccacaggt

SEQ ID NO: 17893 - DNA, 25 bp, synthetic construct
  source 1..25: mol_type = other DNA; mol_type = other DNA
ttgaacggaaccaaaacccacagat

SEQ ID NO: 17894 - DNA, 25 bp, synthetic construct
  source 1..25: mol_type = other DNA; mol_type = other DNA
ttgaacggaaccaaaacccacaaat

SEQ ID NO: 17895 - DNA, 25 bp, synthetic construct
  source 1..25: mol_type = other DNA; mol_type = other DNA
attgaacggaaccaaaacccacagg

SEQ ID NO: 17896 - DNA, 25 bp, synthetic construct
  source 1..25: mol_type = other DNA; mol_type = other DNA
attgaacggaaccaaaacccacaga

SEQ ID NO: 17897 - DNA, 25 bp, synthetic construct
  source 1..25: mol_type = other DNA; mol_type = other DNA
attgaacggaaccaaaacccacaaa

SEQ ID NO: 17898 - DNA, 25 bp, synthetic construct
  source 1..25: mol_type = other DNA; mol_type = other DNA
aattgaacggaaccaaaacccacaa

SEQ ID NO: 17899 - DNA, 25 bp, synthetic construct
  source 1..25: mol_type = other DNA; mol_type = other DNA
aattgaacgaaaccaaaacccacaa

SEQ ID NO: 17900 - DNA, 25 bp, synthetic construct
  source 1..25: mol_type = other DNA; mol_type = other DNA
aaattgaacggaaccaaaacccaca

SEQ ID NO: 17901 - DNA, 25 bp, synthetic construct
  source 1..25: mol_type = other DNA; mol_type = other DNA
aaattgaacgaaaccaaaacccaca

SEQ ID NO: 17902 - DNA, 25 bp, synthetic construct
  source 1..25: mol_type = other DNA; mol_type = other DNA
aaattgaacaaaaccaaaacccaca

SEQ ID NO: 17903 - DNA, 25 bp, synthetic construct
  source 1..25: mol_type = other DNA; mol_type = other DNA
caaattgaacggaaccaaaacccac

SEQ ID NO: 17904 - DNA, 25 bp, synthetic construct
  source 1..25: mol_type = other DNA; mol_type = other DNA
caaattgaacgaaaccaaaacccac

SEQ ID NO: 17905 - DNA, 25 bp, synthetic construct
  source 1..25: mol_type = other DNA; mol_type = other DNA
caaattgaacaaaaccaaaacccac

SEQ ID NO: 17906 - DNA, 25 bp, synthetic construct
  source 1..25: mol_type = other DNA; mol_type = other DNA
ccaaattgaacgaaaccaaaaccca

SEQ ID NO: 17907 - DNA, 25 bp, synthetic construct
  source 1..25: mol_type = other DNA; mol_type = other DNA
ccaaattgaacaaaaccaaaaccca

SEQ ID NO: 17908 - DNA, 25 bp, synthetic construct
  source 1..25: mol_type = other DNA; mol_type = other DNA
cccaaattgaacggaaccaaaaccc

SEQ ID NO: 17909 - DNA, 25 bp, synthetic construct
  source 1..25: mol_type = other DNA; mol_type = other DNA
cccaaattgaacgaaaccaaaaccc

SEQ ID NO: 17910 - DNA, 25 bp, synthetic construct
  source 1..25: mol_type = other DNA; mol_type = other DNA
cccaaattgaacaaaaccaaaaccc

SEQ ID NO: 17911 - DNA, 25 bp, synthetic construct
  source 1..25: mol_type = other DNA; mol_type = other DNA
acccaaattgaacggaaccaaaacc

SEQ ID NO: 17912 - DNA, 25 bp, synthetic construct
  source 1..25: mol_type = other DNA; mol_type = other DNA
acccaaattgaacgaaaccaaaacc

SEQ ID NO: 17913 - DNA, 25 bp, synthetic construct
  source 1..25: mol_type = other DNA; mol_type = other DNA
acccaaattgaacaaaaccaaaacc

SEQ ID NO: 17914 - DNA, 25 bp, synthetic construct
  source 1..25: mol_type = other DNA; mol_type = other DNA
aacccaaattgaacgaaaccaaaac

SEQ ID NO: 17915 - DNA, 25 bp, synthetic construct
  source 1..25: mol_type = other DNA; mol_type = other DNA
aacccaaattgaacaaaaccaaaac

SEQ ID NO: 17916 - DNA, 25 bp, synthetic construct
  source 1..25: mol_type = other DNA; mol_type = other DNA
aaacccaaattgaacggaaccaaaa

SEQ ID NO: 17917 - DNA, 25 bp, synthetic construct
  source 1..25: mol_type = other DNA; mol_type = other DNA
aaacccaaattgaacgaaaccaaaa

SEQ ID NO: 17918 - DNA, 25 bp, synthetic construct
  source 1..25: mol_type = other DNA; mol_type = other DNA
aaacccaaattgaacaaaaccaaaa

SEQ ID NO: 17919 - DNA, 25 bp, synthetic construct
  source 1..25: mol_type = other DNA; mol_type = other DNA
aaaacccaaattgaacggaaccaaa

SEQ ID NO: 17920 - DNA, 25 bp, synthetic construct
  source 1..25: mol_type = other DNA; mol_type = other DNA
aaaacccaaattgaacgaaaccaaa

SEQ ID NO: 17921 - DNA, 25 bp, synthetic construct
  source 1..25: mol_type = other DNA; mol_type = other DNA
aaaacccaaattgaacaaaaccaaa

SEQ ID NO: 17922 - DNA, 25 bp, synthetic construct
  source 1..25: mol_type = other DNA; mol_type = other DNA
aaaaacccaaattgaacgaaaccaa

SEQ ID NO: 17923 - DNA, 25 bp, synthetic construct
  source 1..25: mol_type = other DNA; mol_type = other DNA
aaaaacccaaattgaacaaaaccaa

SEQ ID NO: 17924 - DNA, 25 bp, synthetic construct
  source 1..25: mol_type = other DNA; mol_type = other DNA
taaaaacccaaattgaacggaacca

SEQ ID NO: 17925 - DNA, 25 bp, synthetic construct
  source 1..25: mol_type = other DNA; mol_type = other DNA
taaaaacccaaattgaacgaaacca

SEQ ID NO: 17926 - DNA, 25 bp, synthetic construct
  source 1..25: mol_type = other DNA; mol_type = other DNA
taaaaacccaaattgaacaaaacca

SEQ ID NO: 17927 - DNA, 25 bp, synthetic construct
  source 1..25: mol_type = other DNA; mol_type = other DNA
ttaaaaacccaaattgaacggaacc

SEQ ID NO: 17928 - DNA, 25 bp, synthetic construct
  source 1..25: mol_type = other DNA; mol_type = other DNA
ttaaaaacccaaattgaacgaaacc

SEQ ID NO: 17929 - DNA, 25 bp, synthetic construct
  source 1..25: mol_type = other DNA; mol_type = other DNA
ttaaaaacccaaattgaacaaaacc

SEQ ID NO: 17930 - DNA, 25 bp, synthetic construct
  source 1..25: mol_type = other DNA; mol_type = other DNA
gttaaaaacccaaattgaacgaaac

SEQ ID NO: 17931 - DNA, 25 bp, synthetic construct
  source 1..25: mol_type = other DNA; mol_type = other DNA
gttaaaaacccaaattgaacaaaac

SEQ ID NO: 17932 - DNA, 25 bp, synthetic construct
  source 1..25: mol_type = other DNA; mol_type = other DNA
agttaaaaacccaaattgaacggaa

SEQ ID NO: 17933 - DNA, 25 bp, synthetic construct
  source 1..25: mol_type = other DNA; mol_type = other DNA
agttaaaaacccaaattgaacgaaa

SEQ ID NO: 17934 - DNA, 25 bp, synthetic construct
  source 1..25: mol_type = other DNA; mol_type = other DNA
agttaaaaacccaaattgaacaaaa

SEQ ID NO: 17935 - DNA, 25 bp, synthetic construct
  source 1..25: mol_type = other DNA; mol_type = other DNA
aagttaaaaacccaaattgaacgga

SEQ ID NO: 17936 - DNA, 25 bp, synthetic construct
  source 1..25: mol_type = other DNA; mol_type = other DNA
aagttaaaaacccaaattgaacgaa

SEQ ID NO: 17937 - DNA, 25 bp, synthetic construct
  source 1..25: mol_type = other DNA; mol_type = other DNA
aagttaaaaacccaaattgaacaaa

SEQ ID NO: 17938 - DNA, 25 bp, synthetic construct
  source 1..25: mol_type = other DNA; mol_type = other DNA
aaagttaaaaacccaaattgaacga

SEQ ID NO: 17939 - DNA, 25 bp, synthetic construct
  source 1..25: mol_type = other DNA; mol_type = other DNA
aaagttaaaaacccaaattgaacaa

SEQ ID NO: 17940 - DNA, 25 bp, synthetic construct
  source 1..25: mol_type = other DNA; mol_type = other DNA
taaagttaaaaacccaaattgaacg

SEQ ID NO: 17941 - DNA, 25 bp, synthetic construct
  source 1..25: mol_type = other DNA; mol_type = other DNA
taaagttaaaaacccaaattgaaca

SEQ ID NO: 17942 - DNA, 25 bp, synthetic construct
  source 1..25: mol_type = other DNA; mol_type = other DNA
taaagttaaaaacccaaattaaaca

SEQ ID NO: 17943 - DNA, 25 bp, synthetic construct
  source 1..25: mol_type = other DNA; mol_type = other DNA
atttattacataataatattataat

SEQ ID NO: 17944 - DNA, 25 bp, synthetic construct
  source 1..25: mol_type = other DNA; mol_type = other DNA
aatttattacataataatattataa

SEQ ID NO: 17945 - DNA, 25 bp, synthetic construct
  source 1..25: mol_type = other DNA; mol_type = other DNA
taaatttattacataataatattat

SEQ ID NO: 17946 - DNA, 25 bp, synthetic construct
  source 1..25: mol_type = other DNA; mol_type = other DNA
ataaatttattacataataatatta

SEQ ID NO: 17947 - DNA, 25 bp, synthetic construct
  source 1..25: mol_type = other DNA; mol_type = other DNA
ttataaatttattacataataatat

SEQ ID NO: 17948 - DNA, 25 bp, synthetic construct
  source 1..25: mol_type = other DNA; mol_type = other DNA
cttataaatttattacataataata

SEQ ID NO: 17949 - DNA, 25 bp, synthetic construct
  source 1..25: mol_type = other DNA; mol_type = other DNA
ttcttataaatttattacataataa

SEQ ID NO: 17950 - DNA, 25 bp, synthetic construct
  source 1..25: mol_type = other DNA; mol_type = other DNA
tttcttataaatttattacataata

SEQ ID NO: 17951 - DNA, 25 bp, synthetic construct
  source 1..25: mol_type = other DNA; mol_type = other DNA
catttcttataaatttattacataa

SEQ ID NO: 17952 - DNA, 25 bp, synthetic construct
  source 1..25: mol_type = other DNA; mol_type = other DNA
tcatttcttataaatttattacata

SEQ ID NO: 17953 - DNA, 18 bp, synthetic construct
  source 1..18: mol_type = other DNA; mol_type = other DNA
acaggtcatcgctgagtg

SEQ ID NO: 17954 - DNA, 18 bp, synthetic construct
  source 1..18: mol_type = other DNA; mol_type = other DNA
acaggtcatcgctgagta

SEQ ID NO: 17955 - DNA, 18 bp, synthetic construct
  source 1..18: mol_type = other DNA; mol_type = other DNA
cacaggtcatcgctgagt

SEQ ID NO: 17956 - DNA, 18 bp, synthetic construct
  source 1..18: mol_type = other DNA; mol_type = other DNA
cacaggtcatcgctgaat

SEQ ID NO: 17957 - DNA, 18 bp, synthetic construct
  source 1..18: mol_type = other DNA; mol_type = other DNA
ccacaggtcatcgctgag

SEQ ID NO: 17958 - DNA, 18 bp, synthetic construct
  source 1..18: mol_type = other DNA; mol_type = other DNA
ccacaggtcatcgctgaa

SEQ ID NO: 17959 - DNA, 18 bp, synthetic construct
  source 1..18: mol_type = other DNA; mol_type = other DNA
cccacaggtcatcgctga

SEQ ID NO: 17960 - DNA, 18 bp, synthetic construct
  source 1..18: mol_type = other DNA; mol_type = other DNA
cccacaggtcatcgctaa

SEQ ID NO: 17961 - DNA, 18 bp, synthetic construct
  source 1..18: mol_type = other DNA; mol_type = other DNA
ccccacaggtcatcgctg

SEQ ID NO: 17962 - DNA, 18 bp, synthetic construct
  source 1..18: mol_type = other DNA; mol_type = other DNA
ccccacaggtcatcgcta

SEQ ID NO: 17963 - DNA, 18 bp, synthetic construct
  source 1..18: mol_type = other DNA; mol_type = other DNA
accccacaggtcatcgct

SEQ ID NO: 17964 - DNA, 18 bp, synthetic construct
  source 1..18: mol_type = other DNA; mol_type = other DNA
accccacaggtcatcact

SEQ ID NO: 17965 - DNA, 18 bp, synthetic construct
  source 1..18: mol_type = other DNA; mol_type = other DNA
caccccacaggtcatcgc

SEQ ID NO: 17966 - DNA, 18 bp, synthetic construct
  source 1..18: mol_type = other DNA; mol_type = other DNA
caccccacaggtcatcac

SEQ ID NO: 17967 - DNA, 18 bp, synthetic construct
  source 1..18: mol_type = other DNA; mol_type = other DNA
ccaccccacaggtcatcg

SEQ ID NO: 17968 - DNA, 18 bp, synthetic construct
  source 1..18: mol_type = other DNA; mol_type = other DNA
ccaccccacaggtcatca

SEQ ID NO: 17969 - DNA, 18 bp, synthetic construct
  source 1..18: mol_type = other DNA; mol_type = other DNA
cccaccccacaggtcatc

SEQ ID NO: 17970 - DNA, 18 bp, synthetic construct
  source 1..18: mol_type = other DNA; mol_type = other DNA
cccaccccacagatcatc

SEQ ID NO: 17971 - DNA, 18 bp, synthetic construct
  source 1..18: mol_type = other DNA; mol_type = other DNA
ccccaccccacaggtcat

SEQ ID NO: 17972 - DNA, 18 bp, synthetic construct
  source 1..18: mol_type = other DNA; mol_type = other DNA
ccccaccccacagatcat

SEQ ID NO: 17973 - DNA, 18 bp, synthetic construct
  source 1..18: mol_type = other DNA; mol_type = other DNA
cccccaccccacaggtca

SEQ ID NO: 17974 - DNA, 18 bp, synthetic construct
  source 1..18: mol_type = other DNA; mol_type = other DNA
cccccaccccacagatca

SEQ ID NO: 17975 - DNA, 18 bp, synthetic construct
  source 1..18: mol_type = other DNA; mol_type = other DNA
ccccccaccccacaggtc

SEQ ID NO: 17976 - DNA, 18 bp, synthetic construct
  source 1..18: mol_type = other DNA; mol_type = other DNA
ccccccaccccacagatc

SEQ ID NO: 17977 - DNA, 18 bp, synthetic construct
  source 1..18: mol_type = other DNA; mol_type = other DNA
gccccccaccccacaggt

SEQ ID NO: 17978 - DNA, 18 bp, synthetic construct
  source 1..18: mol_type = other DNA; mol_type = other DNA
gccccccaccccacagat

SEQ ID NO: 17979 - DNA, 18 bp, synthetic construct
  source 1..18: mol_type = other DNA; mol_type = other DNA
ggccccccaccccacagg

SEQ ID NO: 17980 - DNA, 18 bp, synthetic construct
  source 1..18: mol_type = other DNA; mol_type = other DNA
ggccccccaccccacaga

SEQ ID NO: 17981 - DNA, 18 bp, synthetic construct
  source 1..18: mol_type = other DNA; mol_type = other DNA
gggccccccaccccacag

SEQ ID NO: 17982 - DNA, 18 bp, synthetic construct
  source 1..18: mol_type = other DNA; mol_type = other DNA
gggccccccaccccacaa

SEQ ID NO: 17983 - DNA, 18 bp, synthetic construct
  source 1..18: mol_type = other DNA; mol_type = other DNA
agggccccccaccccaca

SEQ ID NO: 17984 - DNA, 18 bp, synthetic construct
  source 1..18: mol_type = other DNA; mol_type = other DNA
aggaccccccaccccaca

SEQ ID NO: 17985 - DNA, 18 bp, synthetic construct
  source 1..18: mol_type = other DNA; mol_type = other DNA
cagggccccccaccccac

SEQ ID NO: 17986 - DNA, 18 bp, synthetic construct
  source 1..18: mol_type = other DNA; mol_type = other DNA
caggaccccccaccccac

SEQ ID NO: 17987 - DNA, 18 bp, synthetic construct
  source 1..18: mol_type = other DNA; mol_type = other DNA
ccagggccccccacccca

SEQ ID NO: 17988 - DNA, 18 bp, synthetic construct
  source 1..18: mol_type = other DNA; mol_type = other DNA
ccaggaccccccacccca

SEQ ID NO: 17989 - DNA, 18 bp, synthetic construct
  source 1..18: mol_type = other DNA; mol_type = other DNA
cccagggccccccacccc

SEQ ID NO: 17990 - DNA, 18 bp, synthetic construct
  source 1..18: mol_type = other DNA; mol_type = other DNA
cccaggaccccccacccc

SEQ ID NO: 17991 - DNA, 18 bp, synthetic construct
  source 1..18: mol_type = other DNA; mol_type = other DNA
tcccagggccccccaccc

SEQ ID NO: 17992 - DNA, 18 bp, synthetic construct
  source 1..18: mol_type = other DNA; mol_type = other DNA
tcccaggaccccccaccc

SEQ ID NO: 17993 - DNA, 18 bp, synthetic construct
  source 1..18: mol_type = other DNA; mol_type = other DNA
gtcccagggccccccacc

SEQ ID NO: 17994 - DNA, 18 bp, synthetic construct
  source 1..18: mol_type = other DNA; mol_type = other DNA
gtcccaggaccccccacc

SEQ ID NO: 17995 - DNA, 18 bp, synthetic construct
  source 1..18: mol_type = other DNA; mol_type = other DNA
cgtcccagggccccccac

SEQ ID NO: 17996 - DNA, 18 bp, synthetic construct
  source 1..18: mol_type = other DNA; mol_type = other DNA
cgtcccaggaccccccac

SEQ ID NO: 17997 - DNA, 18 bp, synthetic construct
  source 1..18: mol_type = other DNA; mol_type = other DNA
acgtcccagggcccccca

SEQ ID NO: 17998 - DNA, 18 bp, synthetic construct
  source 1..18: mol_type = other DNA; mol_type = other DNA
acgtcccaggacccccca

SEQ ID NO: 17999 - DNA, 18 bp, synthetic construct
  source 1..18: mol_type = other DNA; mol_type = other DNA
aacgtcccagggcccccc

SEQ ID NO: 18000 - DNA, 18 bp, synthetic construct
  source 1..18: mol_type = other DNA; mol_type = other DNA
aacgtcccaggacccccc

SEQ ID NO: 18001 - DNA, 18 bp, synthetic construct
  source 1..18: mol_type = other DNA; mol_type = other DNA
aaacgtcccagggccccc

SEQ ID NO: 18002 - DNA, 18 bp, synthetic construct
  source 1..18: mol_type = other DNA; mol_type = other DNA
aaacgtcccaggaccccc

SEQ ID NO: 18003 - DNA, 18 bp, synthetic construct
  source 1..18: mol_type = other DNA; mol_type = other DNA
aaaacgtcccagggcccc

SEQ ID NO: 18004 - DNA, 18 bp, synthetic construct
  source 1..18: mol_type = other DNA; mol_type = other DNA
aaaacgtcccaggacccc

SEQ ID NO: 18005 - DNA, 18 bp, synthetic construct
  source 1..18: mol_type = other DNA; mol_type = other DNA
aaaaacgtcccagggccc

SEQ ID NO: 18006 - DNA, 18 bp, synthetic construct
  source 1..18: mol_type = other DNA; mol_type = other DNA
aaaaacgtcccaggaccc

SEQ ID NO: 18007 - DNA, 18 bp, synthetic construct
  source 1..18: mol_type = other DNA; mol_type = other DNA
tgagaccgagtgtgtatg

SEQ ID NO: 18008 - DNA, 18 bp, synthetic construct
  source 1..18: mol_type = other DNA; mol_type = other DNA
tgagaccgagtgtgtata

SEQ ID NO: 18009 - DNA, 18 bp, synthetic construct
  source 1..18: mol_type = other DNA; mol_type = other DNA
gtgagaccgagtgtgtat

SEQ ID NO: 18010 - DNA, 18 bp, synthetic construct
  source 1..18: mol_type = other DNA; mol_type = other DNA
gtgagaccgagtgtatat

SEQ ID NO: 18011 - DNA, 18 bp, synthetic construct
  source 1..18: mol_type = other DNA; mol_type = other DNA
tgtgagaccgagtgtgta

SEQ ID NO: 18012 - DNA, 18 bp, synthetic construct
  source 1..18: mol_type = other DNA; mol_type = other DNA
tgtgagaccgagtgtata

SEQ ID NO: 18013 - DNA, 18 bp, synthetic construct
  source 1..18: mol_type = other DNA; mol_type = other DNA
gtgtgagaccgagtgtgt

SEQ ID NO: 18014 - DNA, 18 bp, synthetic construct
  source 1..18: mol_type = other DNA; mol_type = other DNA
gtgtgagaccgagtgtat

SEQ ID NO: 18015 - DNA, 18 bp, synthetic construct
  source 1..18: mol_type = other DNA; mol_type = other DNA
agtgtgagaccgagtgtg

SEQ ID NO: 18016 - DNA, 18 bp, synthetic construct
  source 1..18: mol_type = other DNA; mol_type = other DNA
agtgtgagaccgagtgta

SEQ ID NO: 18017 - DNA, 18 bp, synthetic construct
  source 1..18: mol_type = other DNA; mol_type = other DNA
gagtgtgagaccgagtgt

SEQ ID NO: 18018 - DNA, 18 bp, synthetic construct
  source 1..18: mol_type = other DNA; mol_type = other DNA
gagtgtgagaccgagtat

SEQ ID NO: 18019 - DNA, 18 bp, synthetic construct
  source 1..18: mol_type = other DNA; mol_type = other DNA
tgagtgtgagaccgagtg

SEQ ID NO: 18020 - DNA, 18 bp, synthetic construct
  source 1..18: mol_type = other DNA; mol_type = other DNA
tgagtgtgagaccgagta

SEQ ID NO: 18021 - DNA, 18 bp, synthetic construct
  source 1..18: mol_type = other DNA; mol_type = other DNA
gtgagtgtgagaccgagt

SEQ ID NO: 18022 - DNA, 18 bp, synthetic construct
  source 1..18: mol_type = other DNA; mol_type = other DNA
gtgagtgtgagaccgaat

SEQ ID NO: 18023 - DNA, 18 bp, synthetic construct
  source 1..18: mol_type = other DNA; mol_type = other DNA
ggtgagtgtgagaccgag

SEQ ID NO: 18024 - DNA, 18 bp, synthetic construct
  source 1..18: mol_type = other DNA; mol_type = other DNA
ggtgagtgtgagaccgaa

SEQ ID NO: 18025 - DNA, 18 bp, synthetic construct
  source 1..18: mol_type = other DNA; mol_type = other DNA
aggtgagtgtgagaccga

SEQ ID NO: 18026 - DNA, 18 bp, synthetic construct
  source 1..18: mol_type = other DNA; mol_type = other DNA
aggtgagtgtgagaccaa

SEQ ID NO: 18027 - DNA, 18 bp, synthetic construct
  source 1..18: mol_type = other DNA; mol_type = other DNA
caggtgagtgtgagaccg

SEQ ID NO: 18028 - DNA, 18 bp, synthetic construct
  source 1..18: mol_type = other DNA; mol_type = other DNA
caggtgagtgtgagacca

SEQ ID NO: 18029 - DNA, 18 bp, synthetic construct
  source 1..18: mol_type = other DNA; mol_type = other DNA
acaggtgagtgtgagacc

SEQ ID NO: 18030 - DNA, 18 bp, synthetic construct
  source 1..18: mol_type = other DNA; mol_type = other DNA
acaggtgagtgtgaaacc

SEQ ID NO: 18031 - DNA, 18 bp, synthetic construct
  source 1..18: mol_type = other DNA; mol_type = other DNA
cacaggtgagtgtgagac

SEQ ID NO: 18032 - DNA, 18 bp, synthetic construct
  source 1..18: mol_type = other DNA; mol_type = other DNA
cacaggtgagtgtgaaac

SEQ ID NO: 18033 - DNA, 18 bp, synthetic construct
  source 1..18: mol_type = other DNA; mol_type = other DNA
ccacaggtgagtgtgaga

SEQ ID NO: 18034 - DNA, 18 bp, synthetic construct
  source 1..18: mol_type = other DNA; mol_type = other DNA
ccacaggtgagtgtgaaa

SEQ ID NO: 18035 - DNA, 18 bp, synthetic construct
  source 1..18: mol_type = other DNA; mol_type = other DNA
aacccaaattgaacggaa

SEQ ID NO: 18036 - DNA, 18 bp, synthetic construct
  source 1..18: mol_type = other DNA; mol_type = other DNA
aacccaaattgaacgaaa

SEQ ID NO: 18037 - DNA, 18 bp, synthetic construct
  source 1..18: mol_type = other DNA; mol_type = other DNA
aaacccaaattgaacgga

SEQ ID NO: 18038 - DNA, 18 bp, synthetic construct
  source 1..18: mol_type = other DNA; mol_type = other DNA
aaacccaaattgaacgaa

SEQ ID NO: 18039 - DNA, 18 bp, synthetic construct
  source 1..18: mol_type = other DNA; mol_type = other DNA
aaaacccaaattgaacgg

SEQ ID NO: 18040 - DNA, 18 bp, synthetic construct
  source 1..18: mol_type = other DNA; mol_type = other DNA
aaaacccaaattgaacga

SEQ ID NO: 18041 - DNA, 18 bp, synthetic construct
  source 1..18: mol_type = other DNA; mol_type = other DNA
aaaaacccaaattgaacg

SEQ ID NO: 18042 - DNA, 18 bp, synthetic construct
  source 1..18: mol_type = other DNA; mol_type = other DNA
aaaaacccaaattgaaca

SEQ ID NO: 18043 - DNA, 18 bp, synthetic construct
  source 1..18: mol_type = other DNA; mol_type = other DNA
taaaaacccaaattaaac

SEQ ID NO: 18044 - DNA, 18 bp, synthetic construct
  source 1..18: mol_type = other DNA; mol_type = other DNA
ttaaaaacccaaattgaa

SEQ ID NO: 18045 - DNA, 18 bp, synthetic construct
  source 1..18: mol_type = other DNA; mol_type = other DNA
ttaaaaacccaaattaaa

SEQ ID NO: 18046 - DNA, 18 bp, synthetic construct
  source 1..18: mol_type = other DNA; mol_type = other DNA
gttaaaaacccaaattga

SEQ ID NO: 18047 - DNA, 18 bp, synthetic construct
  source 1..18: mol_type = other DNA; mol_type = other DNA
gttaaaaacccaaattaa

SEQ ID NO: 18048 - DNA, 18 bp, synthetic construct
  source 1..18: mol_type = other DNA; mol_type = other DNA
agttaaaaacccaaattg

SEQ ID NO: 18049 - DNA, 18 bp, synthetic construct
  source 1..18: mol_type = other DNA; mol_type = other DNA
agttaaaaacccaaatta

SEQ ID NO: 18050 - DNA, 18 bp, synthetic construct
  source 1..18: mol_type = other DNA; mol_type = other DNA
aagttaaaaacccaaatt

SEQ ID NO: 18051 - DNA, 18 bp, synthetic construct
  source 1..18: mol_type = other DNA; mol_type = other DNA
aaattaaaaacccaaatt

SEQ ID NO: 18052 - DNA, 18 bp, synthetic construct
  source 1..18: mol_type = other DNA; mol_type = other DNA
aaagttaaaaacccaaat

SEQ ID NO: 18053 - DNA, 18 bp, synthetic construct
  source 1..18: mol_type = other DNA; mol_type = other DNA
aaaattaaaaacccaaat

SEQ ID NO: 18054 - DNA, 18 bp, synthetic construct
  source 1..18: mol_type = other DNA; mol_type = other DNA
taaagttaaaaacccaaa

SEQ ID NO: 18055 - DNA, 18 bp, synthetic construct
  source 1..18: mol_type = other DNA; mol_type = other DNA
taaaattaaaaacccaaa

SEQ ID NO: 18056 - DNA, 18 bp, synthetic construct
  source 1..18: mol_type = other DNA; mol_type = other DNA
gtaaagttaaaaacccaa

SEQ ID NO: 18057 - DNA, 18 bp, synthetic construct
  source 1..18: mol_type = other DNA; mol_type = other DNA
gtaaaattaaaaacccaa

SEQ ID NO: 18058 - DNA, 18 bp, synthetic construct
  source 1..18: mol_type = other DNA; mol_type = other DNA
tgtaaagttaaaaaccca

SEQ ID NO: 18059 - DNA, 18 bp, synthetic construct
  source 1..18: mol_type = other DNA; mol_type = other DNA
tgtaaaattaaaaaccca

SEQ ID NO: 18060 - DNA, 18 bp, synthetic construct
  source 1..18: mol_type = other DNA; mol_type = other DNA
ctgtaaagttaaaaaccc

SEQ ID NO: 18061 - DNA, 18 bp, synthetic construct
  source 1..18: mol_type = other DNA; mol_type = other DNA
ctgtaaaattaaaaaccc

SEQ ID NO: 18062 - DNA, 18 bp, synthetic construct
  source 1..18: mol_type = other DNA; mol_type = other DNA
agacagggtgctctcaca

SEQ ID NO: 18063 - DNA, 18 bp, synthetic construct
  source 1..18: mol_type = other DNA; mol_type = other DNA
agacagggtactctcaca

SEQ ID NO: 18064 - DNA, 18 bp, synthetic construct
  source 1..18: mol_type = other DNA; mol_type = other DNA
gagacagggtgctctcac

SEQ ID NO: 18065 - DNA, 18 bp, synthetic construct
  source 1..18: mol_type = other DNA; mol_type = other DNA
gagacagggtactctcac

SEQ ID NO: 18066 - DNA, 18 bp, synthetic construct
  source 1..18: mol_type = other DNA; mol_type = other DNA
ggagacagggtgctctca

SEQ ID NO: 18067 - DNA, 18 bp, synthetic construct
  source 1..18: mol_type = other DNA; mol_type = other DNA
ggagacagggtactctca

SEQ ID NO: 18068 - DNA, 18 bp, synthetic construct
  source 1..18: mol_type = other DNA; mol_type = other DNA
aggagacagggtgctctc

SEQ ID NO: 18069 - DNA, 18 bp, synthetic construct
  source 1..18: mol_type = other DNA; mol_type = other DNA
aggagacagggtactctc

SEQ ID NO: 18070 - DNA, 18 bp, synthetic construct
  source 1..18: mol_type = other DNA; mol_type = other DNA
gaggagacagggtgctct

SEQ ID NO: 18071 - DNA, 18 bp, synthetic construct
  source 1..18: mol_type = other DNA; mol_type = other DNA
gaggagacagggtactct

SEQ ID NO: 18072 - DNA, 18 bp, synthetic construct
  source 1..18: mol_type = other DNA; mol_type = other DNA
agaggagacagggtgctc

SEQ ID NO: 18073 - DNA, 18 bp, synthetic construct
  source 1..18: mol_type = other DNA; mol_type = other DNA
agaggagacagggtactc

SEQ ID NO: 18074 - DNA, 18 bp, synthetic construct
  source 1..18: mol_type = other DNA; mol_type = other DNA
aagaggagacagggtgct

SEQ ID NO: 18075 - DNA, 18 bp, synthetic construct
  source 1..18: mol_type = other DNA; mol_type = other DNA
aagaggagacagggtact

SEQ ID NO: 18076 - DNA, 18 bp, synthetic construct
  source 1..18: mol_type = other DNA; mol_type = other DNA
gaagaggagacagggtgc

SEQ ID NO: 18077 - DNA, 18 bp, synthetic construct
  source 1..18: mol_type = other DNA; mol_type = other DNA
gaagaggagacagggtac

SEQ ID NO: 18078 - DNA, 18 bp, synthetic construct
  source 1..18: mol_type = other DNA; mol_type = other DNA
ggaagaggagacagggtg

SEQ ID NO: 18079 - DNA, 18 bp, synthetic construct
  source 1..18: mol_type = other DNA; mol_type = other DNA
ggaagaggagacagggta

SEQ ID NO: 18080 - DNA, 18 bp, synthetic construct
  source 1..18: mol_type = other DNA; mol_type = other DNA
tggaagaggagacagggt

SEQ ID NO: 18081 - DNA, 18 bp, synthetic construct
  source 1..18: mol_type = other DNA; mol_type = other DNA
tggaagaggagacaggat

SEQ ID NO: 18082 - DNA, 18 bp, synthetic construct
  source 1..18: mol_type = other DNA; mol_type = other DNA
ttggaagaggagacaggg

SEQ ID NO: 18083 - DNA, 18 bp, synthetic construct
  source 1..18: mol_type = other DNA; mol_type = other DNA
ttggaagaggagacagga

SEQ ID NO: 18084 - DNA, 18 bp, synthetic construct
  source 1..18: mol_type = other DNA; mol_type = other DNA
tttggaagaggagacagg

SEQ ID NO: 18085 - DNA, 18 bp, synthetic construct
  source 1..18: mol_type = other DNA; mol_type = other DNA
tttggaagaggagacaga

SEQ ID NO: 18086 - DNA, 18 bp, synthetic construct
  source 1..18: mol_type = other DNA; mol_type = other DNA
ctttggaagaggagacag

SEQ ID NO: 18087 - DNA, 18 bp, synthetic construct
  source 1..18: mol_type = other DNA; mol_type = other DNA
ctttggaagaggagacaa

SEQ ID NO: 18088 - DNA, 18 bp, synthetic construct
  source 1..18: mol_type = other DNA; mol_type = other DNA
tctttggaagaggagaca

SEQ ID NO: 18089 - DNA, 18 bp, synthetic construct
  source 1..18: mol_type = other DNA; mol_type = other DNA
tctttggaagaggaaaca

SEQ ID NO: 18090 - DNA, 18 bp, synthetic construct
  source 1..18: mol_type = other DNA; mol_type = other DNA
ttctttggaagaggagac

SEQ ID NO: 18091 - DNA, 18 bp, synthetic construct
  source 1..18: mol_type = other DNA; mol_type = other DNA
ttctttggaagaggaaac

SEQ ID NO: 18092 - DNA, 18 bp, synthetic construct
  source 1..18: mol_type = other DNA; mol_type = other DNA
tttctttggaagaggaga

SEQ ID NO: 18093 - DNA, 18 bp, synthetic construct
  source 1..18: mol_type = other DNA; mol_type = other DNA
tttctttggaagaggaaa

SEQ ID NO: 18094 - DNA, 18 bp, synthetic construct
  source 1..18: mol_type = other DNA; mol_type = other DNA
ctttctttggaagaggag

SEQ ID NO: 18095 - DNA, 18 bp, synthetic construct
  source 1..18: mol_type = other DNA; mol_type = other DNA
ctttctttggaagaggaa

SEQ ID NO: 18096 - DNA, 18 bp, synthetic construct
  source 1..18: mol_type = other DNA; mol_type = other DNA
actttctttggaagagga

SEQ ID NO: 18097 - DNA, 18 bp, synthetic construct
  source 1..18: mol_type = other DNA; mol_type = other DNA
actttctttggaagagaa

SEQ ID NO: 18098 - DNA, 18 bp, synthetic construct
  source 1..18: mol_type = other DNA; mol_type = other DNA
gactttctttggaagagg

SEQ ID NO: 18099 - DNA, 18 bp, synthetic construct
  source 1..18: mol_type = other DNA; mol_type = other DNA
gactttctttggaagaga

SEQ ID NO: 18100 - DNA, 18 bp, synthetic construct
  source 1..18: mol_type = other DNA; mol_type = other DNA
tgactttctttggaagag

SEQ ID NO: 18101 - DNA, 18 bp, synthetic construct
  source 1..18: mol_type = other DNA; mol_type = other DNA
tgactttctttggaagaa

SEQ ID NO: 18102 - DNA, 18 bp, synthetic construct
  source 1..18: mol_type = other DNA; mol_type = other DNA
ctgactttctttggaaga

SEQ ID NO: 18103 - DNA, 18 bp, synthetic construct
  source 1..18: mol_type = other DNA; mol_type = other DNA
ctgactttctttggaaaa

SEQ ID NO: 18104 - DNA, 18 bp, synthetic construct
  source 1..18: mol_type = other DNA; mol_type = other DNA
tctgactttctttggaag

SEQ ID NO: 18105 - DNA, 18 bp, synthetic construct
  source 1..18: mol_type = other DNA; mol_type = other DNA
tctgactttctttggaaa

SEQ ID NO: 18106 - DNA, 18 bp, synthetic construct
  source 1..18: mol_type = other DNA; mol_type = other DNA
ctctgactttctttggaa

SEQ ID NO: 18107 - DNA, 18 bp, synthetic construct
  source 1..18: mol_type = other DNA; mol_type = other DNA
ctctgactttctttgaaa

SEQ ID NO: 18108 - DNA, 18 bp, synthetic construct
  source 1..18: mol_type = other DNA; mol_type = other DNA
cctctgactttctttgga

SEQ ID NO: 18109 - DNA, 18 bp, synthetic construct
  source 1..18: mol_type = other DNA; mol_type = other DNA
cctctgactttctttgaa

SEQ ID NO: 18110 - DNA, 18 bp, synthetic construct
  source 1..18: mol_type = other DNA; mol_type = other DNA
gcctctgactttctttgg

SEQ ID NO: 18111 - DNA, 18 bp, synthetic construct
  source 1..18: mol_type = other DNA; mol_type = other DNA
gcctctgactttctttga

SEQ ID NO: 18112 - DNA, 18 bp, synthetic construct
  source 1..18: mol_type = other DNA; mol_type = other DNA
ggcctctgactttctttg

SEQ ID NO: 18113 - DNA, 18 bp, synthetic construct
  source 1..18: mol_type = other DNA; mol_type = other DNA
ggcctctgactttcttta

SEQ ID NO: 18114 - DNA, 18 bp, synthetic construct
  source 1..18: mol_type = other DNA; mol_type = other DNA
tggcctctgactttcttt

SEQ ID NO: 18115 - DNA, 18 bp, synthetic construct
  source 1..18: mol_type = other DNA; mol_type = other DNA
tggcctctaactttcttt

SEQ ID NO: 18116 - DNA, 18 bp, synthetic construct
  source 1..18: mol_type = other DNA; mol_type = other DNA
atggcctctgactttctt

SEQ ID NO: 18117 - DNA, 18 bp, synthetic construct
  source 1..18: mol_type = other DNA; mol_type = other DNA
atggcctctaactttctt

SEQ ID NO: 18118 - DNA, 18 bp, synthetic construct
  source 1..18: mol_type = other DNA; mol_type = other DNA
gatggcctctgactttct

SEQ ID NO: 18119 - DNA, 18 bp, synthetic construct
  source 1..18: mol_type = other DNA; mol_type = other DNA
gatggcctctaactttct

SEQ ID NO: 18120 - DNA, 18 bp, synthetic construct
  source 1..18: mol_type = other DNA; mol_type = other DNA
ggatggcctctgactttc

SEQ ID NO: 18121 - DNA, 18 bp, synthetic construct
  source 1..18: mol_type = other DNA; mol_type = other DNA
ggatggcctctaactttc

SEQ ID NO: 18122 - DNA, 18 bp, synthetic construct
  source 1..18: mol_type = other DNA; mol_type = other DNA
aggatggcctctgacttt

SEQ ID NO: 18123 - DNA, 18 bp, synthetic construct
  source 1..18: mol_type = other DNA; mol_type = other DNA
aggatggcctctaacttt

SEQ ID NO: 18124 - DNA, 18 bp, synthetic construct
  source 1..18: mol_type = other DNA; mol_type = other DNA
caggatggcctctgactt

SEQ ID NO: 18125 - DNA, 18 bp, synthetic construct
  source 1..18: mol_type = other DNA; mol_type = other DNA
caggatggcctctaactt

SEQ ID NO: 18126 - DNA, 18 bp, synthetic construct
  source 1..18: mol_type = other DNA; mol_type = other DNA
gcaggatggcctctgact

SEQ ID NO: 18127 - DNA, 18 bp, synthetic construct
  source 1..18: mol_type = other DNA; mol_type = other DNA
gcaggatggcctctaact

SEQ ID NO: 18128 - DNA, 18 bp, synthetic construct
  source 1..18: mol_type = other DNA; mol_type = other DNA
tgcaggatggcctctgac

SEQ ID NO: 18129 - DNA, 18 bp, synthetic construct
  source 1..18: mol_type = other DNA; mol_type = other DNA
tgcaggatggcctctaac

SEQ ID NO: 18130 - DNA, 18 bp, synthetic construct
  source 1..18: mol_type = other DNA; mol_type = other DNA
gtgcaggatggcctctga

SEQ ID NO: 18131 - DNA, 18 bp, synthetic construct
  source 1..18: mol_type = other DNA; mol_type = other DNA
gtgcaggatggcctctaa

SEQ ID NO: 18132 - DNA, 18 bp, synthetic construct
  source 1..18: mol_type = other DNA; mol_type = other DNA
ggtgcaggatggcctctg

SEQ ID NO: 18133 - DNA, 18 bp, synthetic construct
  source 1..18: mol_type = other DNA; mol_type = other DNA
ggtgcaggatggcctcta

SEQ ID NO: 18134 - DNA, 18 bp, synthetic construct
  source 1..18: mol_type = other DNA; mol_type = other DNA
gggtgcaggatggcctct

SEQ ID NO: 18135 - DNA, 18 bp, synthetic construct
  source 1..18: mol_type = other DNA; mol_type = other DNA
gggtgcaggatgacctct

SEQ ID NO: 18136 - DNA, 18 bp, synthetic construct
  source 1..18: mol_type = other DNA; mol_type = other DNA
agggtgcaggatggcctc

SEQ ID NO: 18137 - DNA, 18 bp, synthetic construct
  source 1..18: mol_type = other DNA; mol_type = other DNA
agggtgcaggatgacctc

SEQ ID NO: 18138 - DNA, 18 bp, synthetic construct
  source 1..18: mol_type = other DNA; mol_type = other DNA
acataataatattataat

SEQ ID NO: 18139 - DNA, 18 bp, synthetic construct
  source 1..18: mol_type = other DNA; mol_type = other DNA
tacataataatattataa

SEQ ID NO: 18140 - DNA, 18 bp, synthetic construct
  source 1..18: mol_type = other DNA; mol_type = other DNA
ttacataataatattata

SEQ ID NO: 18141 - DNA, 18 bp, synthetic construct
  source 1..18: mol_type = other DNA; mol_type = other DNA
attacataataatattat

SEQ ID NO: 18142 - DNA, 18 bp, synthetic construct
  source 1..18: mol_type = other DNA; mol_type = other DNA
tattacataataatatta

SEQ ID NO: 18143 - DNA, 18 bp, synthetic construct
  source 1..18: mol_type = other DNA; mol_type = other DNA
ttattacataataatatt

SEQ ID NO: 18144 - DNA, 18 bp, synthetic construct
  source 1..18: mol_type = other DNA; mol_type = other DNA
tttattacataataatat

SEQ ID NO: 18145 - DNA, 18 bp, synthetic construct
  source 1..18: mol_type = other DNA; mol_type = other DNA
atttattacataataata

SEQ ID NO: 18146 - DNA, 18 bp, synthetic construct
  source 1..18: mol_type = other DNA; mol_type = other DNA
aatttattacataataat

SEQ ID NO: 18147 - DNA, 18 bp, synthetic construct
  source 1..18: mol_type = other DNA; mol_type = other DNA
aaatttattacataataa

SEQ ID NO: 18148 - DNA, 18 bp, synthetic construct
  source 1..18: mol_type = other DNA; mol_type = other DNA
taaatttattacataata

SEQ ID NO: 18149 - DNA, 18 bp, synthetic construct
  source 1..18: mol_type = other DNA; mol_type = other DNA
ataaatttattacataat

SEQ ID NO: 18150 - DNA, 18 bp, synthetic construct
  source 1..18: mol_type = other DNA; mol_type = other DNA
tataaatttattacataa

SEQ ID NO: 18151 - DNA, 18 bp, synthetic construct
  source 1..18: mol_type = other DNA; mol_type = other DNA
ttataaatttattacata

SEQ ID NO: 18152 - DNA, 18 bp, synthetic construct
  source 1..18: mol_type = other DNA; mol_type = other DNA
cttataaatttattacat

SEQ ID NO: 18153 - DNA, 18 bp, synthetic construct
  source 1..18: mol_type = other DNA; mol_type = other DNA
tcttataaatttattaca

SEQ ID NO: 18154 - DNA, 18 bp, synthetic construct
  source 1..18: mol_type = other DNA; mol_type = other DNA
ttcttataaatttattac

SEQ ID NO: 18155 - DNA, 18 bp, synthetic construct
  source 1..18: mol_type = other DNA; mol_type = other DNA
tttcttataaatttatta

SEQ ID NO: 18156 - DNA, 18 bp, synthetic construct
  source 1..18: mol_type = other DNA; mol_type = other DNA
atttcttataaatttatt

SEQ ID NO: 18157 - DNA, 18 bp, synthetic construct
  source 1..18: mol_type = other DNA; mol_type = other DNA
catttcttataaatttat

SEQ ID NO: 18158 - DNA, 18 bp, synthetic construct
  source 1..18: mol_type = other DNA; mol_type = other DNA
tcatttcttataaattta

SEQ ID NO: 18159 - DNA, 18 bp, synthetic construct
  source 1..18: mol_type = other DNA; mol_type = other DNA
ttcatttcttataaattt

SEQ ID NO: 18160 - DNA, 18 bp, synthetic construct
  source 1..18: mol_type = other DNA; mol_type = other DNA
cgagaatcccaatgtctc

SEQ ID NO: 18161 - DNA, 18 bp, synthetic construct
  source 1..18: mol_type = other DNA; mol_type = other DNA
cgagaatcccaatatctc

SEQ ID NO: 18162 - DNA, 18 bp, synthetic construct
  source 1..18: mol_type = other DNA; mol_type = other DNA
tcgagaatcccaatgtct

SEQ ID NO: 18163 - DNA, 18 bp, synthetic construct
  source 1..18: mol_type = other DNA; mol_type = other DNA
tcgagaatcccaatatct

SEQ ID NO: 18164 - DNA, 18 bp, synthetic construct
  source 1..18: mol_type = other DNA; mol_type = other DNA
atcgagaatcccaatgtc

SEQ ID NO: 18165 - DNA, 18 bp, synthetic construct
  source 1..18: mol_type = other DNA; mol_type = other DNA
atcgagaatcccaatatc

SEQ ID NO: 18166 - DNA, 18 bp, synthetic construct
  source 1..18: mol_type = other DNA; mol_type = other DNA
catcgagaatcccaatgt

SEQ ID NO: 18167 - DNA, 18 bp, synthetic construct
  source 1..18: mol_type = other DNA; mol_type = other DNA
catcgagaatcccaatat

SEQ ID NO: 18168 - DNA, 18 bp, synthetic construct
  source 1..18: mol_type = other DNA; mol_type = other DNA
ccatcgagaatcccaatg

SEQ ID NO: 18169 - DNA, 18 bp, synthetic construct
  source 1..18: mol_type = other DNA; mol_type = other DNA
ccatcgagaatcccaata

SEQ ID NO: 18170 - DNA, 18 bp, synthetic construct
  source 1..18: mol_type = other DNA; mol_type = other DNA
cccatcgagaatcccaat

SEQ ID NO: 18171 - DNA, 18 bp, synthetic construct
  source 1..18: mol_type = other DNA; mol_type = other DNA
cccatcgaaaatcccaat

SEQ ID NO: 18172 - DNA, 18 bp, synthetic construct
  source 1..18: mol_type = other DNA; mol_type = other DNA
ccccatcgagaatcccaa

SEQ ID NO: 18173 - DNA, 18 bp, synthetic construct
  source 1..18: mol_type = other DNA; mol_type = other DNA
ccccatcgaaaatcccaa

SEQ ID NO: 18174 - DNA, 18 bp, synthetic construct
  source 1..18: mol_type = other DNA; mol_type = other DNA
cccccatcgagaatccca

SEQ ID NO: 18175 - DNA, 18 bp, synthetic construct
  source 1..18: mol_type = other DNA; mol_type = other DNA
cccccatcgaaaatccca

SEQ ID NO: 18176 - DNA, 18 bp, synthetic construct
  source 1..18: mol_type = other DNA; mol_type = other DNA
gcccccatcgagaatccc

SEQ ID NO: 18177 - DNA, 18 bp, synthetic construct
  source 1..18: mol_type = other DNA; mol_type = other DNA
gcccccatcgaaaatccc

SEQ ID NO: 18178 - DNA, 18 bp, synthetic construct
  source 1..18: mol_type = other DNA; mol_type = other DNA
ggcccccatcgagaatcc

SEQ ID NO: 18179 - DNA, 18 bp, synthetic construct
  source 1..18: mol_type = other DNA; mol_type = other DNA
ggcccccatcgaaaatcc

SEQ ID NO: 18180 - DNA, 18 bp, synthetic construct
  source 1..18: mol_type = other DNA; mol_type = other DNA
tggcccccatcgagaatc

SEQ ID NO: 18181 - DNA, 18 bp, synthetic construct
  source 1..18: mol_type = other DNA; mol_type = other DNA
tggcccccatcgaaaatc

SEQ ID NO: 18182 - DNA, 18 bp, synthetic construct
  source 1..18: mol_type = other DNA; mol_type = other DNA
ttggcccccatcgagaat

SEQ ID NO: 18183 - DNA, 18 bp, synthetic construct
  source 1..18: mol_type = other DNA; mol_type = other DNA
ttggcccccatcgaaaat

SEQ ID NO: 18184 - DNA, 18 bp, synthetic construct
  source 1..18: mol_type = other DNA; mol_type = other DNA
cttggcccccatcgagaa

SEQ ID NO: 18185 - DNA, 18 bp, synthetic construct
  source 1..18: mol_type = other DNA; mol_type = other DNA
cttggcccccatcgaaaa

SEQ ID NO: 18186 - DNA, 18 bp, synthetic construct
  source 1..18: mol_type = other DNA; mol_type = other DNA
ccttggcccccatcgaga

SEQ ID NO: 18187 - DNA, 18 bp, synthetic construct
  source 1..18: mol_type = other DNA; mol_type = other DNA
ccttggcccccatcgaaa

SEQ ID NO: 18188 - DNA, 18 bp, synthetic construct
  source 1..18: mol_type = other DNA; mol_type = other DNA
tccttggcccccatcgag

SEQ ID NO: 18189 - DNA, 18 bp, synthetic construct
  source 1..18: mol_type = other DNA; mol_type = other DNA
tccttggcccccatcgaa

SEQ ID NO: 18190 - DNA, 18 bp, synthetic construct
  source 1..18: mol_type = other DNA; mol_type = other DNA
ctccttggcccccatcga

SEQ ID NO: 18191 - DNA, 18 bp, synthetic construct
  source 1..18: mol_type = other DNA; mol_type = other DNA
ctccttggcccccatcaa

SEQ ID NO: 18192 - DNA, 18 bp, synthetic construct
  source 1..18: mol_type = other DNA; mol_type = other DNA
gctccttggcccccatcg

SEQ ID NO: 18193 - DNA, 18 bp, synthetic construct
  source 1..18: mol_type = other DNA; mol_type = other DNA
gctccttggcccccatca

SEQ ID NO: 18194 - DNA, 18 bp, synthetic construct
  source 1..18: mol_type = other DNA; mol_type = other DNA
ggctccttggcccccatc

SEQ ID NO: 18195 - DNA, 18 bp, synthetic construct
  source 1..18: mol_type = other DNA; mol_type = other DNA
ggctccttgacccccatc

SEQ ID NO: 18196 - DNA, 18 bp, synthetic construct
  source 1..18: mol_type = other DNA; mol_type = other DNA
gggctccttggcccccat

SEQ ID NO: 18197 - DNA, 18 bp, synthetic construct
  source 1..18: mol_type = other DNA; mol_type = other DNA
gggctccttgacccccat

SEQ ID NO: 18198 - DNA, 18 bp, synthetic construct
  source 1..18: mol_type = other DNA; mol_type = other DNA
agggctccttggccccca

SEQ ID NO: 18199 - DNA, 18 bp, synthetic construct
  source 1..18: mol_type = other DNA; mol_type = other DNA
gaggctccttggccccca

SEQ ID NO: 18200 - DNA, 18 bp, synthetic construct
  source 1..18: mol_type = other DNA; mol_type = other DNA
ggagctccttggccccca

SEQ ID NO: 18201 - DNA, 18 bp, synthetic construct
  source 1..18: mol_type = other DNA; mol_type = other DNA
gggactccttggccccca

SEQ ID NO: 18202 - DNA, 18 bp, synthetic construct
  source 1..18: mol_type = other DNA; mol_type = other DNA
gagggctccttggccccc

SEQ ID NO: 18203 - DNA, 18 bp, synthetic construct
  source 1..18: mol_type = other DNA; mol_type = other DNA
ggaggctccttggccccc

SEQ ID NO: 18204 - DNA, 18 bp, synthetic construct
  source 1..18: mol_type = other DNA; mol_type = other DNA
gggagctccttggccccc

SEQ ID NO: 18205 - DNA, 18 bp, synthetic construct
  source 1..18: mol_type = other DNA; mol_type = other DNA
ggagggctccttggcccc

SEQ ID NO: 18206 - DNA, 18 bp, synthetic construct
  source 1..18: mol_type = other DNA; mol_type = other DNA
gggaggctccttggcccc

SEQ ID NO: 18207 - DNA, 18 bp, synthetic construct
  source 1..18: mol_type = other DNA; mol_type = other DNA
aggagggctccttggccc

SEQ ID NO: 18208 - DNA, 18 bp, synthetic construct
  source 1..18: mol_type = other DNA; mol_type = other DNA
agggaggctccttggccc

SEQ ID NO: 18209 - DNA, 18 bp, synthetic construct
  source 1..18: mol_type = other DNA; mol_type = other DNA
caggagggctccttggcc

SEQ ID NO: 18210 - DNA, 18 bp, synthetic construct
  source 1..18: mol_type = other DNA; mol_type = other DNA
cagggaggctccttggcc

SEQ ID NO: 18211 - DNA, 18 bp, synthetic construct
  source 1..18: mol_type = other DNA; mol_type = other DNA
acaggagggctccttggc

SEQ ID NO: 18212 - DNA, 18 bp, synthetic construct
  source 1..18: mol_type = other DNA; mol_type = other DNA
acagggaggctccttggc

SEQ ID NO: 18213 - DNA, 18 bp, synthetic construct
  source 1..18: mol_type = other DNA; mol_type = other DNA
aacaggagggctccttgg

SEQ ID NO: 18214 - DNA, 18 bp, synthetic construct
  source 1..18: mol_type = other DNA; mol_type = other DNA
aacagggaggctccttgg

SEQ ID NO: 18215 - DNA, 18 bp, synthetic construct
  source 1..18: mol_type = other DNA; mol_type = other DNA
aaacaggtgggctccttg

SEQ ID NO: 18216 - DNA, 18 bp, synthetic construct
  source 1..18: mol_type = other DNA; mol_type = other DNA
aaacagggtggctccttg

SEQ ID NO: 18217 - DNA, 18 bp, synthetic construct
  source 1..18: mol_type = other DNA; mol_type = other DNA
aaaacaggtgggctcctt

SEQ ID NO: 18218 - DNA, 18 bp, synthetic construct
  source 1..18: mol_type = other DNA; mol_type = other DNA
aaaacagggtggctcctt

SEQ ID NO: 18219 - DNA, 18 bp, synthetic construct
  source 1..18: mol_type = other DNA; mol_type = other DNA
caaaacaggtgggctcct

SEQ ID NO: 18220 - DNA, 18 bp, synthetic construct
  source 1..18: mol_type = other DNA; mol_type = other DNA
caaaacagggtggctcct

SEQ ID NO: 18221 - DNA, 18 bp, synthetic construct
  source 1..18: mol_type = other DNA; mol_type = other DNA
gcaaaacaggtgggctcc

SEQ ID NO: 18222 - DNA, 18 bp, synthetic construct
  source 1..18: mol_type = other DNA; mol_type = other DNA
gcaaaacagggtggctcc

SEQ ID NO: 18223 - DNA, 18 bp, synthetic construct
  source 1..18: mol_type = other DNA; mol_type = other DNA
tgcaaaacaggtgggctc

SEQ ID NO: 18224 - DNA, 18 bp, synthetic construct
  source 1..18: mol_type = other DNA; mol_type = other DNA
tgcaaaacagggtggctc

SEQ ID NO: 18225 - DNA, 18 bp, synthetic construct
  source 1..18: mol_type = other DNA; mol_type = other DNA
atgcaaaacaggtgggct

SEQ ID NO: 18226 - DNA, 18 bp, synthetic construct
  source 1..18: mol_type = other DNA; mol_type = other DNA
atgcaaaacagggtggct

SEQ ID NO: 18227 - DNA, 18 bp, synthetic construct
  source 1..18: mol_type = other DNA; mol_type = other DNA
tatgcaaaacaggtgggc

SEQ ID NO: 18228 - DNA, 18 bp, synthetic construct
  source 1..18: mol_type = other DNA; mol_type = other DNA
tatgcaaaacagggtggc

SEQ ID NO: 18229 - DNA, 18 bp, synthetic construct
  source 1..18: mol_type = other DNA; mol_type = other DNA
atatgcaaaacaggtggg

SEQ ID NO: 18230 - DNA, 18 bp, synthetic construct
  source 1..18: mol_type = other DNA; mol_type = other DNA
atatgcaaaacagggtgg

SEQ ID NO: 18231 - DNA, 18 bp, synthetic construct
  source 1..18: mol_type = other DNA; mol_type = other DNA
aatatgcaaaacagtggg

SEQ ID NO: 18232 - DNA, 18 bp, synthetic construct
  source 1..18: mol_type = other DNA; mol_type = other DNA
aatatgcaaaacaggtgg

SEQ ID NO: 18233 - DNA, 18 bp, synthetic construct
  source 1..18: mol_type = other DNA; mol_type = other DNA
aatatgcaaaacagggtg

SEQ ID NO: 18234 - DNA, 18 bp, synthetic construct
  source 1..18: mol_type = other DNA; mol_type = other DNA
aaatatgcaaaacaggga

SEQ ID NO: 18235 - DNA, 18 bp, synthetic construct
  source 1..18: mol_type = other DNA; mol_type = other DNA
aaaatatgcaaaacaggg

SEQ ID NO: 18236 - DNA, 18 bp, synthetic construct
  source 1..18: mol_type = other DNA; mol_type = other DNA
aaaatatgcaaaacagga

SEQ ID NO: 18237 - DNA, 18 bp, synthetic construct
  source 1..18: mol_type = other DNA; mol_type = other DNA
taaaatatgcaaaacagg

SEQ ID NO: 18238 - DNA, 18 bp, synthetic construct
  source 1..18: mol_type = other DNA; mol_type = other DNA
taaaatatgcaaaacaga

SEQ ID NO: 18239 - DNA, 18 bp, synthetic construct
  source 1..18: mol_type = other DNA; mol_type = other DNA
ttaaaatatgcaaaacag

SEQ ID NO: 18240 - DNA, 18 bp, synthetic construct
  source 1..18: mol_type = other DNA; mol_type = other DNA
ttaaaatatgcaaaacaa

SEQ ID NO: 18241 - DNA, 18 bp, synthetic construct
  source 1..18: mol_type = other DNA; mol_type = other DNA
accctgtgaggaagatgg

SEQ ID NO: 18242 - DNA, 18 bp, synthetic construct
  source 1..18: mol_type = other DNA; mol_type = other DNA
accctgtgaggaagatga

SEQ ID NO: 18243 - DNA, 18 bp, synthetic construct
  source 1..18: mol_type = other DNA; mol_type = other DNA
gaccctgtgaggaagatg

SEQ ID NO: 18244 - DNA, 18 bp, synthetic construct
  source 1..18: mol_type = other DNA; mol_type = other DNA
gaccctgtgaggaagata

SEQ ID NO: 18245 - DNA, 18 bp, synthetic construct
  source 1..18: mol_type = other DNA; mol_type = other DNA
agaccctgtgaggaagat

SEQ ID NO: 18246 - DNA, 18 bp, synthetic construct
  source 1..18: mol_type = other DNA; mol_type = other DNA
agaccctgtgaggaaaat

SEQ ID NO: 18247 - DNA, 18 bp, synthetic construct
  source 1..18: mol_type = other DNA; mol_type = other DNA
gagaccctgtgaggaaga

SEQ ID NO: 18248 - DNA, 18 bp, synthetic construct
  source 1..18: mol_type = other DNA; mol_type = other DNA
gagaccctgtgaggaaaa

SEQ ID NO: 18249 - DNA, 18 bp, synthetic construct
  source 1..18: mol_type = other DNA; mol_type = other DNA
agagaccctgtgaggaag

SEQ ID NO: 18250 - DNA, 18 bp, synthetic construct
  source 1..18: mol_type = other DNA; mol_type = other DNA
agagaccctgtgaggaaa

SEQ ID NO: 18251 - DNA, 18 bp, synthetic construct
  source 1..18: mol_type = other DNA; mol_type = other DNA
gagagaccctgtgaggaa

SEQ ID NO: 18252 - DNA, 18 bp, synthetic construct
  source 1..18: mol_type = other DNA; mol_type = other DNA
gagagaccctgtgagaaa

SEQ ID NO: 18253 - DNA, 18 bp, synthetic construct
  source 1..18: mol_type = other DNA; mol_type = other DNA
ggagagaccctgtgagga

SEQ ID NO: 18254 - DNA, 18 bp, synthetic construct
  source 1..18: mol_type = other DNA; mol_type = other DNA
ggagagaccctgtgagaa

SEQ ID NO: 18255 - DNA, 18 bp, synthetic construct
  source 1..18: mol_type = other DNA; mol_type = other DNA
gggagagaccctgtgagg

SEQ ID NO: 18256 - DNA, 18 bp, synthetic construct
  source 1..18: mol_type = other DNA; mol_type = other DNA
gggagagaccctgtgaga

SEQ ID NO: 18257 - DNA, 18 bp, synthetic construct
  source 1..18: mol_type = other DNA; mol_type = other DNA
tgggagagaccctgtgag

SEQ ID NO: 18258 - DNA, 18 bp, synthetic construct
  source 1..18: mol_type = other DNA; mol_type = other DNA
gtggagagaccctgtgag

SEQ ID NO: 18259 - DNA, 18 bp, synthetic construct
  source 1..18: mol_type = other DNA; mol_type = other DNA
ggtgagagaccctgtgag

SEQ ID NO: 18260 - DNA, 18 bp, synthetic construct
  source 1..18: mol_type = other DNA; mol_type = other DNA
gggtagagaccctgtgag

SEQ ID NO: 18261 - DNA, 18 bp, synthetic construct
  source 1..18: mol_type = other DNA; mol_type = other DNA
ttgggagagaccctgtga

SEQ ID NO: 18262 - DNA, 18 bp, synthetic construct
  source 1..18: mol_type = other DNA; mol_type = other DNA
tgtggagagaccctgtga

SEQ ID NO: 18263 - DNA, 18 bp, synthetic construct
  source 1..18: mol_type = other DNA; mol_type = other DNA
tggtgagagaccctgtga

SEQ ID NO: 18264 - DNA, 18 bp, synthetic construct
  source 1..18: mol_type = other DNA; mol_type = other DNA
tgggtagagaccctgtga

SEQ ID NO: 18265 - DNA, 18 bp, synthetic construct
  source 1..18: mol_type = other DNA; mol_type = other DNA
ttagggagagaccctgtg

SEQ ID NO: 18266 - DNA, 18 bp, synthetic construct
  source 1..18: mol_type = other DNA; mol_type = other DNA
ttgaggagagaccctgtg

SEQ ID NO: 18267 - DNA, 18 bp, synthetic construct
  source 1..18: mol_type = other DNA; mol_type = other DNA
ttggagagagaccctgtg

SEQ ID NO: 18268 - DNA, 18 bp, synthetic construct
  source 1..18: mol_type = other DNA; mol_type = other DNA
ttgggaagagaccctgtg

SEQ ID NO: 18269 - DNA, 18 bp, synthetic construct
  source 1..18: mol_type = other DNA; mol_type = other DNA
cttagggagagaccctgt

SEQ ID NO: 18270 - DNA, 18 bp, synthetic construct
  source 1..18: mol_type = other DNA; mol_type = other DNA
cttgaggagagaccctgt

SEQ ID NO: 18271 - DNA, 18 bp, synthetic construct
  source 1..18: mol_type = other DNA; mol_type = other DNA
cttggagagagaccctgt

SEQ ID NO: 18272 - DNA, 18 bp, synthetic construct
  source 1..18: mol_type = other DNA; mol_type = other DNA
cttgggaagagaccctgt

SEQ ID NO: 18273 - DNA, 18 bp, synthetic construct
  source 1..18: mol_type = other DNA; mol_type = other DNA
ccttagggagagaccctg

SEQ ID NO: 18274 - DNA, 18 bp, synthetic construct
  source 1..18: mol_type = other DNA; mol_type = other DNA
ccttgaggagagaccctg

SEQ ID NO: 18275 - DNA, 18 bp, synthetic construct
  source 1..18: mol_type = other DNA; mol_type = other DNA
ccttggagagagaccctg

SEQ ID NO: 18276 - DNA, 18 bp, synthetic construct
  source 1..18: mol_type = other DNA; mol_type = other DNA
ccttgggaagagaccctg

SEQ ID NO: 18277 - DNA, 18 bp, synthetic construct
  source 1..18: mol_type = other DNA; mol_type = other DNA
tccttagggagagaccct

SEQ ID NO: 18278 - DNA, 18 bp, synthetic construct
  source 1..18: mol_type = other DNA; mol_type = other DNA
tccttgaggagagaccct

SEQ ID NO: 18279 - DNA, 18 bp, synthetic construct
  source 1..18: mol_type = other DNA; mol_type = other DNA
tccttggagagagaccct

SEQ ID NO: 18280 - DNA, 18 bp, synthetic construct
  source 1..18: mol_type = other DNA; mol_type = other DNA
tccttgggaagagaccct

SEQ ID NO: 18281 - DNA, 18 bp, synthetic construct
  source 1..18: mol_type = other DNA; mol_type = other DNA
ctccttagggagagaccc

SEQ ID NO: 18282 - DNA, 18 bp, synthetic construct
  source 1..18: mol_type = other DNA; mol_type = other DNA
ctccttgaggagagaccc

SEQ ID NO: 18283 - DNA, 18 bp, synthetic construct
  source 1..18: mol_type = other DNA; mol_type = other DNA
ctccttggagagagaccc

SEQ ID NO: 18284 - DNA, 18 bp, synthetic construct
  source 1..18: mol_type = other DNA; mol_type = other DNA
ctccttgggaagagaccc

SEQ ID NO: 18285 - DNA, 18 bp, synthetic construct
  source 1..18: mol_type = other DNA; mol_type = other DNA
cctccttagggagagacc

SEQ ID NO: 18286 - DNA, 18 bp, synthetic construct
  source 1..18: mol_type = other DNA; mol_type = other DNA
cctccttgaggagagacc

SEQ ID NO: 18287 - DNA, 18 bp, synthetic construct
  source 1..18: mol_type = other DNA; mol_type = other DNA
cctccttggagagagacc

SEQ ID NO: 18288 - DNA, 18 bp, synthetic construct
  source 1..18: mol_type = other DNA; mol_type = other DNA
cctccttgggaagagacc

SEQ ID NO: 18289 - DNA, 18 bp, synthetic construct
  source 1..18: mol_type = other DNA; mol_type = other DNA
ccctccttagggagagac

SEQ ID NO: 18290 - DNA, 18 bp, synthetic construct
  source 1..18: mol_type = other DNA; mol_type = other DNA
ccctccttgaggagagac

SEQ ID NO: 18291 - DNA, 18 bp, synthetic construct
  source 1..18: mol_type = other DNA; mol_type = other DNA
ccctccttggagagagac

SEQ ID NO: 18292 - DNA, 18 bp, synthetic construct
  source 1..18: mol_type = other DNA; mol_type = other DNA
ccctccttgggaagagac

SEQ ID NO: 18293 - DNA, 18 bp, synthetic construct
  source 1..18: mol_type = other DNA; mol_type = other DNA
cccctccttagggagaga

SEQ ID NO: 18294 - DNA, 18 bp, synthetic construct
  source 1..18: mol_type = other DNA; mol_type = other DNA
cccctccttgaggagaga

SEQ ID NO: 18295 - DNA, 18 bp, synthetic construct
  source 1..18: mol_type = other DNA; mol_type = other DNA
cccctccttggagagaga

SEQ ID NO: 18296 - DNA, 18 bp, synthetic construct
  source 1..18: mol_type = other DNA; mol_type = other DNA
cccctccttgggaagaga

SEQ ID NO: 18297 - DNA, 18 bp, synthetic construct
  source 1..18: mol_type = other DNA; mol_type = other DNA
ccccctccttagggagag

SEQ ID NO: 18298 - DNA, 18 bp, synthetic construct
  source 1..18: mol_type = other DNA; mol_type = other DNA
ccccctccttgaggagag

SEQ ID NO: 18299 - DNA, 18 bp, synthetic construct
  source 1..18: mol_type = other DNA; mol_type = other DNA
ccccctccttggagagag

SEQ ID NO: 18300 - DNA, 18 bp, synthetic construct
  source 1..18: mol_type = other DNA; mol_type = other DNA
ccccctccttgggaagag

SEQ ID NO: 18301 - DNA, 18 bp, synthetic construct
  source 1..18: mol_type = other DNA; mol_type = other DNA
gccccctccttagggaga

SEQ ID NO: 18302 - DNA, 18 bp, synthetic construct
  source 1..18: mol_type = other DNA; mol_type = other DNA
gccccctccttgaggaga

SEQ ID NO: 18303 - DNA, 18 bp, synthetic construct
  source 1..18: mol_type = other DNA; mol_type = other DNA
gccccctccttggagaga

SEQ ID NO: 18304 - DNA, 18 bp, synthetic construct
  source 1..18: mol_type = other DNA; mol_type = other DNA
gccccctccttgggaaga

SEQ ID NO: 18305 - DNA, 18 bp, synthetic construct
  source 1..18: mol_type = other DNA; mol_type = other DNA
agccccctccttagggag

SEQ ID NO: 18306 - DNA, 18 bp, synthetic construct
  source 1..18: mol_type = other DNA; mol_type = other DNA
agccccctccttgaggag

SEQ ID NO: 18307 - DNA, 18 bp, synthetic construct
  source 1..18: mol_type = other DNA; mol_type = other DNA
agccccctccttggagag

SEQ ID NO: 18308 - DNA, 18 bp, synthetic construct
  source 1..18: mol_type = other DNA; mol_type = other DNA
agccccctccttgggaag

SEQ ID NO: 18309 - DNA, 18 bp, synthetic construct
  source 1..18: mol_type = other DNA; mol_type = other DNA
tagccccctccttgggaa

SEQ ID NO: 18310 - DNA, 18 bp, synthetic construct
  source 1..18: mol_type = other DNA; mol_type = other DNA
ctagccccctccttggga

SEQ ID NO: 18311 - DNA, 18 bp, synthetic construct
  source 1..18: mol_type = other DNA; mol_type = other DNA
gctagccccctccttggg

SEQ ID NO: 18312 - DNA, 18 bp, synthetic construct
  source 1..18: mol_type = other DNA; mol_type = other DNA
gctagccccctccttgga

SEQ ID NO: 18313 - DNA, 18 bp, synthetic construct
  source 1..18: mol_type = other DNA; mol_type = other DNA
agctagccccctccttgg

SEQ ID NO: 18314 - DNA, 18 bp, synthetic construct
  source 1..18: mol_type = other DNA; mol_type = other DNA
agctagccccctccttga

SEQ ID NO: 18315 - DNA, 18 bp, synthetic construct
  source 1..18: mol_type = other DNA; mol_type = other DNA
aagctagccccctccttg

SEQ ID NO: 18316 - DNA, 18 bp, synthetic construct
  source 1..18: mol_type = other DNA; mol_type = other DNA
aagctagccccctcctta

SEQ ID NO: 18317 - DNA, 18 bp, synthetic construct
  source 1..18: mol_type = other DNA; mol_type = other DNA
caagctagccccctcctt

SEQ ID NO: 18318 - DNA, 18 bp, synthetic construct
  source 1..18: mol_type = other DNA; mol_type = other DNA
caagctaaccccctcctt

SEQ ID NO: 18319 - DNA, 18 bp, synthetic construct
  source 1..18: mol_type = other DNA; mol_type = other DNA
ccaagctagccccctcct

SEQ ID NO: 18320 - DNA, 18 bp, synthetic construct
  source 1..18: mol_type = other DNA; mol_type = other DNA
ccaagctaaccccctcct

SEQ ID NO: 18321 - DNA, 18 bp, synthetic construct
  source 1..18: mol_type = other DNA; mol_type = other DNA
accaagctagccccctcc

SEQ ID NO: 18322 - DNA, 18 bp, synthetic construct
  source 1..18: mol_type = other DNA; mol_type = other DNA
accaagctaaccccctcc

SEQ ID NO: 18323 - DNA, 18 bp, synthetic construct
  source 1..18: mol_type = other DNA; mol_type = other DNA
gaccaagctagccccctc

SEQ ID NO: 18324 - DNA, 18 bp, synthetic construct
  source 1..18: mol_type = other DNA; mol_type = other DNA
gaccaagctaaccccctc

SEQ ID NO: 18325 - DNA, 18 bp, synthetic construct
  source 1..18: mol_type = other DNA; mol_type = other DNA
ggaccaagctagccccct

SEQ ID NO: 18326 - DNA, 18 bp, synthetic construct
  source 1..18: mol_type = other DNA; mol_type = other DNA
ggaccaagctaaccccct

SEQ ID NO: 18327 - DNA, 18 bp, synthetic construct
  source 1..18: mol_type = other DNA; mol_type = other DNA
gggaccaagctagccccc

SEQ ID NO: 18328 - DNA, 18 bp, synthetic construct
  source 1..18: mol_type = other DNA; mol_type = other DNA
gggaccaagctaaccccc

SEQ ID NO: 18329 - DNA, 18 bp, synthetic construct
  source 1..18: mol_type = other DNA; mol_type = other DNA
tgggaccaagctagcccc

SEQ ID NO: 18330 - DNA, 18 bp, synthetic construct
  source 1..18: mol_type = other DNA; mol_type = other DNA
gtggaccaagctagcccc

SEQ ID NO: 18331 - DNA, 18 bp, synthetic construct
  source 1..18: mol_type = other DNA; mol_type = other DNA
ggtgaccaagctagcccc

SEQ ID NO: 18332 - DNA, 18 bp, synthetic construct
  source 1..18: mol_type = other DNA; mol_type = other DNA
gggtaccaagctagcccc

SEQ ID NO: 18333 - DNA, 18 bp, synthetic construct
  source 1..18: mol_type = other DNA; mol_type = other DNA
ttgggaccaagctagccc

SEQ ID NO: 18334 - DNA, 18 bp, synthetic construct
  source 1..18: mol_type = other DNA; mol_type = other DNA
tgtggaccaagctagccc

SEQ ID NO: 18335 - DNA, 18 bp, synthetic construct
  source 1..18: mol_type = other DNA; mol_type = other DNA
tggtgaccaagctagccc

SEQ ID NO: 18336 - DNA, 18 bp, synthetic construct
  source 1..18: mol_type = other DNA; mol_type = other DNA
tgggtaccaagctagccc

SEQ ID NO: 18337 - DNA, 18 bp, synthetic construct
  source 1..18: mol_type = other DNA; mol_type = other DNA
attgggaccaagctagcc

SEQ ID NO: 18338 - DNA, 18 bp, synthetic construct
  source 1..18: mol_type = other DNA; mol_type = other DNA
atgtggaccaagctagcc

SEQ ID NO: 18339 - DNA, 18 bp, synthetic construct
  source 1..18: mol_type = other DNA; mol_type = other DNA
atggtgaccaagctagcc

SEQ ID NO: 18340 - DNA, 18 bp, synthetic construct
  source 1..18: mol_type = other DNA; mol_type = other DNA
atgggtaccaagctagcc

SEQ ID NO: 18341 - DNA, 18 bp, synthetic construct
  source 1..18: mol_type = other DNA; mol_type = other DNA
cattgggaccaagctagc

SEQ ID NO: 18342 - DNA, 18 bp, synthetic construct
  source 1..18: mol_type = other DNA; mol_type = other DNA
catgtggaccaagctagc

SEQ ID NO: 18343 - DNA, 18 bp, synthetic construct
  source 1..18: mol_type = other DNA; mol_type = other DNA
catggtgaccaagctagc

SEQ ID NO: 18344 - DNA, 18 bp, synthetic construct
  source 1..18: mol_type = other DNA; mol_type = other DNA
catgggtaccaagctagc

SEQ ID NO: 18345 - DNA, 18 bp, synthetic construct
  source 1..18: mol_type = other DNA; mol_type = other DNA
gcattgggaccaagctag

SEQ ID NO: 18346 - DNA, 18 bp, synthetic construct
  source 1..18: mol_type = other DNA; mol_type = other DNA
gcatgtggaccaagctag

SEQ ID NO: 18347 - DNA, 18 bp, synthetic construct
  source 1..18: mol_type = other DNA; mol_type = other DNA
gcatggtgaccaagctag

SEQ ID NO: 18348 - DNA, 18 bp, synthetic construct
  source 1..18: mol_type = other DNA; mol_type = other DNA
gcatgggtaccaagctag

SEQ ID NO: 18349 - DNA, 18 bp, synthetic construct
  source 1..18: mol_type = other DNA; mol_type = other DNA
agcattgggaccaagcta

SEQ ID NO: 18350 - DNA, 18 bp, synthetic construct
  source 1..18: mol_type = other DNA; mol_type = other DNA
agcatgtggaccaagcta

SEQ ID NO: 18351 - DNA, 18 bp, synthetic construct
  source 1..18: mol_type = other DNA; mol_type = other DNA
agcatggtgaccaagcta

SEQ ID NO: 18352 - DNA, 18 bp, synthetic construct
  source 1..18: mol_type = other DNA; mol_type = other DNA
agcatgggtaccaagcta

SEQ ID NO: 18353 - DNA, 18 bp, synthetic construct
  source 1..18: mol_type = other DNA; mol_type = other DNA
gctgggcaccctcgaggg

SEQ ID NO: 18354 - DNA, 18 bp, synthetic construct
  source 1..18: mol_type = other DNA; mol_type = other DNA
gctgggcaccctcggagg

SEQ ID NO: 18355 - DNA, 18 bp, synthetic construct
  source 1..18: mol_type = other DNA; mol_type = other DNA
gctgggcaccctcgggag

SEQ ID NO: 18356 - DNA, 18 bp, synthetic construct
  source 1..18: mol_type = other DNA; mol_type = other DNA
ggctgggcaccctcggga

SEQ ID NO: 18357 - DNA, 18 bp, synthetic construct
  source 1..18: mol_type = other DNA; mol_type = other DNA
gggctgggcaccctcggg

SEQ ID NO: 18358 - DNA, 18 bp, synthetic construct
  source 1..18: mol_type = other DNA; mol_type = other DNA
gggctgggcaccctcgga

SEQ ID NO: 18359 - DNA, 18 bp, synthetic construct
  source 1..18: mol_type = other DNA; mol_type = other DNA
agggctgggcaccctcgg

SEQ ID NO: 18360 - DNA, 18 bp, synthetic construct
  source 1..18: mol_type = other DNA; mol_type = other DNA
gaggctgggcaccctcgg

SEQ ID NO: 18361 - DNA, 18 bp, synthetic construct
  source 1..18: mol_type = other DNA; mol_type = other DNA
ggagctgggcaccctcgg

SEQ ID NO: 18362 - DNA, 18 bp, synthetic construct
  source 1..18: mol_type = other DNA; mol_type = other DNA
gggactgggcaccctcgg

SEQ ID NO: 18363 - DNA, 18 bp, synthetic construct
  source 1..18: mol_type = other DNA; mol_type = other DNA
gagggctgggcaccctcg

SEQ ID NO: 18364 - DNA, 18 bp, synthetic construct
  source 1..18: mol_type = other DNA; mol_type = other DNA
ggaggctgggcaccctcg

SEQ ID NO: 18365 - DNA, 18 bp, synthetic construct
  source 1..18: mol_type = other DNA; mol_type = other DNA
gggagctgggcaccctcg

SEQ ID NO: 18366 - DNA, 18 bp, synthetic construct
  source 1..18: mol_type = other DNA; mol_type = other DNA
ggagggctgggcaccctc

SEQ ID NO: 18367 - DNA, 18 bp, synthetic construct
  source 1..18: mol_type = other DNA; mol_type = other DNA
gggaggctgggcaccctc

SEQ ID NO: 18368 - DNA, 18 bp, synthetic construct
  source 1..18: mol_type = other DNA; mol_type = other DNA
tggagggctgggcaccct

SEQ ID NO: 18369 - DNA, 18 bp, synthetic construct
  source 1..18: mol_type = other DNA; mol_type = other DNA
tgggaggctgggcaccct

SEQ ID NO: 18370 - DNA, 18 bp, synthetic construct
  source 1..18: mol_type = other DNA; mol_type = other DNA
gtggagggctgggcaccc

SEQ ID NO: 18371 - DNA, 18 bp, synthetic construct
  source 1..18: mol_type = other DNA; mol_type = other DNA
gtgggaggctgggcaccc

SEQ ID NO: 18372 - DNA, 18 bp, synthetic construct
  source 1..18: mol_type = other DNA; mol_type = other DNA
tgtggagggctgggcacc

SEQ ID NO: 18373 - DNA, 18 bp, synthetic construct
  source 1..18: mol_type = other DNA; mol_type = other DNA
tgtgggaggctgggcacc

SEQ ID NO: 18374 - DNA, 18 bp, synthetic construct
  source 1..18: mol_type = other DNA; mol_type = other DNA
gtgtggagggctgggcac

SEQ ID NO: 18375 - DNA, 18 bp, synthetic construct
  source 1..18: mol_type = other DNA; mol_type = other DNA
gtgtgggaggctgggcac

SEQ ID NO: 18376 - DNA, 18 bp, synthetic construct
  source 1..18: mol_type = other DNA; mol_type = other DNA
agtgtggagggctgggca

SEQ ID NO: 18377 - DNA, 18 bp, synthetic construct
  source 1..18: mol_type = other DNA; mol_type = other DNA
agtgtgggaggctgggca

SEQ ID NO: 18378 - DNA, 18 bp, synthetic construct
  source 1..18: mol_type = other DNA; mol_type = other DNA
cagtgtggagggctgggc

SEQ ID NO: 18379 - DNA, 18 bp, synthetic construct
  source 1..18: mol_type = other DNA; mol_type = other DNA
cagtgtgggaggctgggc

SEQ ID NO: 18380 - DNA, 18 bp, synthetic construct
  source 1..18: mol_type = other DNA; mol_type = other DNA
acagtgtggagggctggg

SEQ ID NO: 18381 - DNA, 18 bp, synthetic construct
  source 1..18: mol_type = other DNA; mol_type = other DNA
acagtgtgggaggctggg

SEQ ID NO: 18382 - DNA, 18 bp, synthetic construct
  source 1..18: mol_type = other DNA; mol_type = other DNA
cacagtgtggagggctgg

SEQ ID NO: 18383 - DNA, 18 bp, synthetic construct
  source 1..18: mol_type = other DNA; mol_type = other DNA
cacagtgtgggaggctgg

SEQ ID NO: 18384 - DNA, 18 bp, synthetic construct
  source 1..18: mol_type = other DNA; mol_type = other DNA
tcacagtgtggagggctg

SEQ ID NO: 18385 - DNA, 18 bp, synthetic construct
  source 1..18: mol_type = other DNA; mol_type = other DNA
tcacagtgtgggaggctg

SEQ ID NO: 18386 - DNA, 18 bp, synthetic construct
  source 1..18: mol_type = other DNA; mol_type = other DNA
gtcacagtgtggagggct

SEQ ID NO: 18387 - DNA, 18 bp, synthetic construct
  source 1..18: mol_type = other DNA; mol_type = other DNA
gtcacagtgtgggaggct

SEQ ID NO: 18388 - DNA, 18 bp, synthetic construct
  source 1..18: mol_type = other DNA; mol_type = other DNA
agtcacagtgtggagggc

SEQ ID NO: 18389 - DNA, 18 bp, synthetic construct
  source 1..18: mol_type = other DNA; mol_type = other DNA
agtcacagtgtgggaggc

SEQ ID NO: 18390 - DNA, 18 bp, synthetic construct
  source 1..18: mol_type = other DNA; mol_type = other DNA
gagtcacagtgtggaggg

SEQ ID NO: 18391 - DNA, 18 bp, synthetic construct
  source 1..18: mol_type = other DNA; mol_type = other DNA
gagtcacagtgtgggagg

SEQ ID NO: 18392 - DNA, 18 bp, synthetic construct
  source 1..18: mol_type = other DNA; mol_type = other DNA
ggagtcacagtgtgaggg

SEQ ID NO: 18393 - DNA, 18 bp, synthetic construct
  source 1..18: mol_type = other DNA; mol_type = other DNA
ggagtcacagtgtggagg

SEQ ID NO: 18394 - DNA, 18 bp, synthetic construct
  source 1..18: mol_type = other DNA; mol_type = other DNA
ggagtcacagtgtgggag

SEQ ID NO: 18395 - DNA, 18 bp, synthetic construct
  source 1..18: mol_type = other DNA; mol_type = other DNA
aggagtcacagtgtggga

SEQ ID NO: 18396 - DNA, 18 bp, synthetic construct
  source 1..18: mol_type = other DNA; mol_type = other DNA
gaggagtcacagtgtggg

SEQ ID NO: 18397 - DNA, 18 bp, synthetic construct
  source 1..18: mol_type = other DNA; mol_type = other DNA
gaggagtcacagtgtgga

SEQ ID NO: 18398 - DNA, 18 bp, synthetic construct
  source 1..18: mol_type = other DNA; mol_type = other DNA
tgaggagtcacagtgtgg

SEQ ID NO: 18399 - DNA, 18 bp, synthetic construct
  source 1..18: mol_type = other DNA; mol_type = other DNA
tgaggagtcacagtgtga

SEQ ID NO: 18400 - DNA, 18 bp, synthetic construct
  source 1..18: mol_type = other DNA; mol_type = other DNA
gtgaggagtcacagtgtg

SEQ ID NO: 18401 - DNA, 18 bp, synthetic construct
  source 1..18: mol_type = other DNA; mol_type = other DNA
gtgaggagtcacagtgta

SEQ ID NO: 18402 - DNA, 18 bp, synthetic construct
  source 1..18: mol_type = other DNA; mol_type = other DNA
tgtgaggagtcacagtgt

SEQ ID NO: 18403 - DNA, 18 bp, synthetic construct
  source 1..18: mol_type = other DNA; mol_type = other DNA
tgtgaggagtcacagtat

SEQ ID NO: 18404 - DNA, 18 bp, synthetic construct
  source 1..18: mol_type = other DNA; mol_type = other DNA
gtgtgaggagtcacagtg

SEQ ID NO: 18405 - DNA, 18 bp, synthetic construct
  source 1..18: mol_type = other DNA; mol_type = other DNA
gtgtgaggagtcacagta

SEQ ID NO: 18406 - DNA, 18 bp, synthetic construct
  source 1..18: mol_type = other DNA; mol_type = other DNA
agtgtgaggagtcacagt

SEQ ID NO: 18407 - DNA, 18 bp, synthetic construct
  source 1..18: mol_type = other DNA; mol_type = other DNA
agtgtgaggagtcacaat

SEQ ID NO: 18408 - DNA, 18 bp, synthetic construct
  source 1..18: mol_type = other DNA; mol_type = other DNA
gagtgtgaggagtcacag

SEQ ID NO: 18409 - DNA, 18 bp, synthetic construct
  source 1..18: mol_type = other DNA; mol_type = other DNA
gagtgtgaggagtcacaa

SEQ ID NO: 18410 - DNA, 18 bp, synthetic construct
  source 1..18: mol_type = other DNA; mol_type = other DNA
tgagtgtgaggagtcaca

SEQ ID NO: 18411 - DNA, 18 bp, synthetic construct
  source 1..18: mol_type = other DNA; mol_type = other DNA
tgagtgtgaggaatcaca

SEQ ID NO: 18412 - DNA, 18 bp, synthetic construct
  source 1..18: mol_type = other DNA; mol_type = other DNA
ctgagtgtgaggagtcac

SEQ ID NO: 18413 - DNA, 18 bp, synthetic construct
  source 1..18: mol_type = other DNA; mol_type = other DNA
ctgagtgtgaggaatcac

SEQ ID NO: 18414 - DNA, 18 bp, synthetic construct
  source 1..18: mol_type = other DNA; mol_type = other DNA
gctgagtgtgaggagtca

SEQ ID NO: 18415 - DNA, 18 bp, synthetic construct
  source 1..18: mol_type = other DNA; mol_type = other DNA
gctgagtgtgaggaatca

SEQ ID NO: 18416 - DNA, 18 bp, synthetic construct
  source 1..18: mol_type = other DNA; mol_type = other DNA
cgctgagtgtgaggagtc

SEQ ID NO: 18417 - DNA, 18 bp, synthetic construct
  source 1..18: mol_type = other DNA; mol_type = other DNA
cgctgagtgtgaggaatc

SEQ ID NO: 18418 - DNA, 18 bp, synthetic construct
  source 1..18: mol_type = other DNA; mol_type = other DNA
tcgctgagtgtgaggagt

SEQ ID NO: 18419 - DNA, 18 bp, synthetic construct
  source 1..18: mol_type = other DNA; mol_type = other DNA
tcgctgagtgtgaggaat

SEQ ID NO: 18420 - DNA, 18 bp, synthetic construct
  source 1..18: mol_type = other DNA; mol_type = other DNA
atcgctgagtgtgaggag

SEQ ID NO: 18421 - DNA, 18 bp, synthetic construct
  source 1..18: mol_type = other DNA; mol_type = other DNA
atcgctgagtgtgaggaa

SEQ ID NO: 18422 - DNA, 18 bp, synthetic construct
  source 1..18: mol_type = other DNA; mol_type = other DNA
catcgctgagtgtgagga

SEQ ID NO: 18423 - DNA, 18 bp, synthetic construct
  source 1..18: mol_type = other DNA; mol_type = other DNA
catcgctgagtgtgagaa

SEQ ID NO: 18424 - DNA, 18 bp, synthetic construct
  source 1..18: mol_type = other DNA; mol_type = other DNA
tcatcgctgagtgtgagg

SEQ ID NO: 18425 - DNA, 18 bp, synthetic construct
  source 1..18: mol_type = other DNA; mol_type = other DNA
tcatcgctgagtgtgaga

SEQ ID NO: 18426 - DNA, 18 bp, synthetic construct
  source 1..18: mol_type = other DNA; mol_type = other DNA
gtcatcgctgagtgtgag

SEQ ID NO: 18427 - DNA, 18 bp, synthetic construct
  source 1..18: mol_type = other DNA; mol_type = other DNA
gtcatcgctgagtgtgaa

SEQ ID NO: 18428 - DNA, 18 bp, synthetic construct
  source 1..18: mol_type = other DNA; mol_type = other DNA
ggtcatcgctgagtgtga

SEQ ID NO: 18429 - DNA, 18 bp, synthetic construct
  source 1..18: mol_type = other DNA; mol_type = other DNA
ggtcatcgctgagtgtaa

SEQ ID NO: 18430 - DNA, 18 bp, synthetic construct
  source 1..18: mol_type = other DNA; mol_type = other DNA
aggtcatcgctgagtgtg

SEQ ID NO: 18431 - DNA, 18 bp, synthetic construct
  source 1..18: mol_type = other DNA; mol_type = other DNA
aggtcatcgctgagtgta

SEQ ID NO: 18432 - DNA, 18 bp, synthetic construct
  source 1..18: mol_type = other DNA; mol_type = other DNA
caggtcatcgctgagtgt

SEQ ID NO: 18433 - DNA, 18 bp, synthetic construct
  source 1..18: mol_type = other DNA; mol_type = other DNA
caggtcatcgctgagtat

SEQ ID NO: 18434 - DNA, 18 bp, synthetic construct
  source 1..18: mol_type = other DNA; mol_type = other DNA
tggcagtggcagtgaggg

SEQ ID NO: 18435 - DNA, 18 bp, synthetic construct
  source 1..18: mol_type = other DNA; mol_type = other DNA
tggcagtggcagtgagga

SEQ ID NO: 18436 - DNA, 18 bp, synthetic construct
  source 1..18: mol_type = other DNA; mol_type = other DNA
gtggcagtggcagtgagg

SEQ ID NO: 18437 - DNA, 18 bp, synthetic construct
  source 1..18: mol_type = other DNA; mol_type = other DNA
gtggcagtggcagtgaga

SEQ ID NO: 18438 - DNA, 18 bp, synthetic construct
  source 1..18: mol_type = other DNA; mol_type = other DNA
ggtggcagtggcagtgag

SEQ ID NO: 18439 - DNA, 18 bp, synthetic construct
  source 1..18: mol_type = other DNA; mol_type = other DNA
ggtggcagtggcagtgaa

SEQ ID NO: 18440 - DNA, 18 bp, synthetic construct
  source 1..18: mol_type = other DNA; mol_type = other DNA
gggtggcagtggcagtga

SEQ ID NO: 18441 - DNA, 18 bp, synthetic construct
  source 1..18: mol_type = other DNA; mol_type = other DNA
gggtggcagtggcagtaa

SEQ ID NO: 18442 - DNA, 18 bp, synthetic construct
  source 1..18: mol_type = other DNA; mol_type = other DNA
agggtggcagtggcagtg

SEQ ID NO: 18443 - DNA, 18 bp, synthetic construct
  source 1..18: mol_type = other DNA; mol_type = other DNA
gaggtggcagtggcagtg

SEQ ID NO: 18444 - DNA, 18 bp, synthetic construct
  source 1..18: mol_type = other DNA; mol_type = other DNA
ggagtggcagtggcagtg

SEQ ID NO: 18445 - DNA, 18 bp, synthetic construct
  source 1..18: mol_type = other DNA; mol_type = other DNA
gggatggcagtggcagtg

SEQ ID NO: 18446 - DNA, 18 bp, synthetic construct
  source 1..18: mol_type = other DNA; mol_type = other DNA
tagggtggcagtggcagt

SEQ ID NO: 18447 - DNA, 18 bp, synthetic construct
  source 1..18: mol_type = other DNA; mol_type = other DNA
tgaggtggcagtggcagt

SEQ ID NO: 18448 - DNA, 18 bp, synthetic construct
  source 1..18: mol_type = other DNA; mol_type = other DNA
tggagtggcagtggcagt

SEQ ID NO: 18449 - DNA, 18 bp, synthetic construct
  source 1..18: mol_type = other DNA; mol_type = other DNA
tgggatggcagtggcagt

SEQ ID NO: 18450 - DNA, 18 bp, synthetic construct
  source 1..18: mol_type = other DNA; mol_type = other DNA
gtagggtggcagtggcag

SEQ ID NO: 18451 - DNA, 18 bp, synthetic construct
  source 1..18: mol_type = other DNA; mol_type = other DNA
gtgaggtggcagtggcag

SEQ ID NO: 18452 - DNA, 18 bp, synthetic construct
  source 1..18: mol_type = other DNA; mol_type = other DNA
gtggagtggcagtggcag

SEQ ID NO: 18453 - DNA, 18 bp, synthetic construct
  source 1..18: mol_type = other DNA; mol_type = other DNA
gtgggatggcagtggcag

SEQ ID NO: 18454 - DNA, 18 bp, synthetic construct
  source 1..18: mol_type = other DNA; mol_type = other DNA
tgtagggtggcagtggca

SEQ ID NO: 18455 - DNA, 18 bp, synthetic construct
  source 1..18: mol_type = other DNA; mol_type = other DNA
tgtgaggtggcagtggca

SEQ ID NO: 18456 - DNA, 18 bp, synthetic construct
  source 1..18: mol_type = other DNA; mol_type = other DNA
tgtggagtggcagtggca

SEQ ID NO: 18457 - DNA, 18 bp, synthetic construct
  source 1..18: mol_type = other DNA; mol_type = other DNA
tgtgggatggcagtggca

SEQ ID NO: 18458 - DNA, 18 bp, synthetic construct
  source 1..18: mol_type = other DNA; mol_type = other DNA
ttgtagggtggcagtggc

SEQ ID NO: 18459 - DNA, 18 bp, synthetic construct
  source 1..18: mol_type = other DNA; mol_type = other DNA
ttgtgaggtggcagtggc

SEQ ID NO: 18460 - DNA, 18 bp, synthetic construct
  source 1..18: mol_type = other DNA; mol_type = other DNA
ttgtggagtggcagtggc

SEQ ID NO: 18461 - DNA, 18 bp, synthetic construct
  source 1..18: mol_type = other DNA; mol_type = other DNA
ttgtgggatggcagtggc

SEQ ID NO: 18462 - DNA, 18 bp, synthetic construct
  source 1..18: mol_type = other DNA; mol_type = other DNA
gttgtagggtggcagtgg

SEQ ID NO: 18463 - DNA, 18 bp, synthetic construct
  source 1..18: mol_type = other DNA; mol_type = other DNA
gttgtgaggtggcagtgg

SEQ ID NO: 18464 - DNA, 18 bp, synthetic construct
  source 1..18: mol_type = other DNA; mol_type = other DNA
gttgtggagtggcagtgg

SEQ ID NO: 18465 - DNA, 18 bp, synthetic construct
  source 1..18: mol_type = other DNA; mol_type = other DNA
gttgtgggatggcagtgg

SEQ ID NO: 18466 - DNA, 18 bp, synthetic construct
  source 1..18: mol_type = other DNA; mol_type = other DNA
cgttgtagggtggcagtg

SEQ ID NO: 18467 - DNA, 18 bp, synthetic construct
  source 1..18: mol_type = other DNA; mol_type = other DNA
cgttgtgaggtggcagtg

SEQ ID NO: 18468 - DNA, 18 bp, synthetic construct
  source 1..18: mol_type = other DNA; mol_type = other DNA
cgttgtggagtggcagtg

SEQ ID NO: 18469 - DNA, 18 bp, synthetic construct
  source 1..18: mol_type = other DNA; mol_type = other DNA
cgttgtgggatggcagtg

SEQ ID NO: 18470 - DNA, 18 bp, synthetic construct
  source 1..18: mol_type = other DNA; mol_type = other DNA
ccgttgtagggtggcagt

SEQ ID NO: 18471 - DNA, 18 bp, synthetic construct
  source 1..18: mol_type = other DNA; mol_type = other DNA
ccgttgtgaggtggcagt

SEQ ID NO: 18472 - DNA, 18 bp, synthetic construct
  source 1..18: mol_type = other DNA; mol_type = other DNA
ccgttgtggagtggcagt

SEQ ID NO: 18473 - DNA, 18 bp, synthetic construct
  source 1..18: mol_type = other DNA; mol_type = other DNA
ccgttgtgggatggcagt

SEQ ID NO: 18474 - DNA, 18 bp, synthetic construct
  source 1..18: mol_type = other DNA; mol_type = other DNA
cccgttgtagggtggcag

SEQ ID NO: 18475 - DNA, 18 bp, synthetic construct
  source 1..18: mol_type = other DNA; mol_type = other DNA
cccgttgtgaggtggcag

SEQ ID NO: 18476 - DNA, 18 bp, synthetic construct
  source 1..18: mol_type = other DNA; mol_type = other DNA
cccgttgtggagtggcag

SEQ ID NO: 18477 - DNA, 18 bp, synthetic construct
  source 1..18: mol_type = other DNA; mol_type = other DNA
cccgttgtgggatggcag

SEQ ID NO: 18478 - DNA, 18 bp, synthetic construct
  source 1..18: mol_type = other DNA; mol_type = other DNA
ccccgttgtagggtggca

SEQ ID NO: 18479 - DNA, 18 bp, synthetic construct
  source 1..18: mol_type = other DNA; mol_type = other DNA
ccccgttgtgaggtggca

SEQ ID NO: 18480 - DNA, 18 bp, synthetic construct
  source 1..18: mol_type = other DNA; mol_type = other DNA
ccccgttgtggagtggca

SEQ ID NO: 18481 - DNA, 18 bp, synthetic construct
  source 1..18: mol_type = other DNA; mol_type = other DNA
ccccgttgtgggatggca

SEQ ID NO: 18482 - DNA, 18 bp, synthetic construct
  source 1..18: mol_type = other DNA; mol_type = other DNA
gccccgttgtagggtggc

SEQ ID NO: 18483 - DNA, 18 bp, synthetic construct
  source 1..18: mol_type = other DNA; mol_type = other DNA
gccccgttgtgaggtggc

SEQ ID NO: 18484 - DNA, 18 bp, synthetic construct
  source 1..18: mol_type = other DNA; mol_type = other DNA
gccccgttgtggagtggc

SEQ ID NO: 18485 - DNA, 18 bp, synthetic construct
  source 1..18: mol_type = other DNA; mol_type = other DNA
gccccgttgtgggatggc

SEQ ID NO: 18486 - DNA, 18 bp, synthetic construct
  source 1..18: mol_type = other DNA; mol_type = other DNA
tgccccgttgtagggtgg

SEQ ID NO: 18487 - DNA, 18 bp, synthetic construct
  source 1..18: mol_type = other DNA; mol_type = other DNA
tgccccgttgtgaggtgg

SEQ ID NO: 18488 - DNA, 18 bp, synthetic construct
  source 1..18: mol_type = other DNA; mol_type = other DNA
tgccccgttgtggagtgg

SEQ ID NO: 18489 - DNA, 18 bp, synthetic construct
  source 1..18: mol_type = other DNA; mol_type = other DNA
tgccccgttgtgggatgg

SEQ ID NO: 18490 - DNA, 18 bp, synthetic construct
  source 1..18: mol_type = other DNA; mol_type = other DNA
ctgccccgttgtagggtg

SEQ ID NO: 18491 - DNA, 18 bp, synthetic construct
  source 1..18: mol_type = other DNA; mol_type = other DNA
ctgccccgttgtgaggtg

SEQ ID NO: 18492 - DNA, 18 bp, synthetic construct
  source 1..18: mol_type = other DNA; mol_type = other DNA
ctgccccgttgtggagtg

SEQ ID NO: 18493 - DNA, 18 bp, synthetic construct
  source 1..18: mol_type = other DNA; mol_type = other DNA
ctgccccgttgtgggatg

SEQ ID NO: 18494 - DNA, 18 bp, synthetic construct
  source 1..18: mol_type = other DNA; mol_type = other DNA
cctgccccgttgtgggat

SEQ ID NO: 18495 - DNA, 18 bp, synthetic construct
  source 1..18: mol_type = other DNA; mol_type = other DNA
accctaggtttaaaaacg

SEQ ID NO: 18496 - DNA, 18 bp, synthetic construct
  source 1..18: mol_type = other DNA; mol_type = other DNA
accctaggtttaaaaaca

SEQ ID NO: 18497 - DNA, 18 bp, synthetic construct
  source 1..18: mol_type = other DNA; mol_type = other DNA
accctagatttaaaaaca

SEQ ID NO: 18498 - DNA, 18 bp, synthetic construct
  source 1..18: mol_type = other DNA; mol_type = other DNA
aaccctaggtttaaaaac

SEQ ID NO: 18499 - DNA, 18 bp, synthetic construct
  source 1..18: mol_type = other DNA; mol_type = other DNA
aaccctagatttaaaaac

SEQ ID NO: 18500 - DNA, 18 bp, synthetic construct
  source 1..18: mol_type = other DNA; mol_type = other DNA
aaccctaaatttaaaaac

SEQ ID NO: 18501 - DNA, 18 bp, synthetic construct
  source 1..18: mol_type = other DNA; mol_type = other DNA
aaaccctaggtttaaaaa

SEQ ID NO: 18502 - DNA, 18 bp, synthetic construct
  source 1..18: mol_type = other DNA; mol_type = other DNA
aaaccctagatttaaaaa

SEQ ID NO: 18503 - DNA, 18 bp, synthetic construct
  source 1..18: mol_type = other DNA; mol_type = other DNA
aaaccctaaatttaaaaa

SEQ ID NO: 18504 - DNA, 18 bp, synthetic construct
  source 1..18: mol_type = other DNA; mol_type = other DNA
caaaccctaggtttaaaa

SEQ ID NO: 18505 - DNA, 18 bp, synthetic construct
  source 1..18: mol_type = other DNA; mol_type = other DNA
caaaccctagatttaaaa

SEQ ID NO: 18506 - DNA, 18 bp, synthetic construct
  source 1..18: mol_type = other DNA; mol_type = other DNA
caaaccctaaatttaaaa

SEQ ID NO: 18507 - DNA, 18 bp, synthetic construct
  source 1..18: mol_type = other DNA; mol_type = other DNA
ccaaaccctaggtttaaa

SEQ ID NO: 18508 - DNA, 18 bp, synthetic construct
  source 1..18: mol_type = other DNA; mol_type = other DNA
ccaaaccctagatttaaa

SEQ ID NO: 18509 - DNA, 18 bp, synthetic construct
  source 1..18: mol_type = other DNA; mol_type = other DNA
ccaaaccctaaatttaaa

SEQ ID NO: 18510 - DNA, 18 bp, synthetic construct
  source 1..18: mol_type = other DNA; mol_type = other DNA
tccaaaccctaggtttaa

SEQ ID NO: 18511 - DNA, 18 bp, synthetic construct
  source 1..18: mol_type = other DNA; mol_type = other DNA
tccaaaccctagatttaa

SEQ ID NO: 18512 - DNA, 18 bp, synthetic construct
  source 1..18: mol_type = other DNA; mol_type = other DNA
tccaaaccctaaatttaa

SEQ ID NO: 18513 - DNA, 18 bp, synthetic construct
  source 1..18: mol_type = other DNA; mol_type = other DNA
ctccaaaccctaggttta

SEQ ID NO: 18514 - DNA, 18 bp, synthetic construct
  source 1..18: mol_type = other DNA; mol_type = other DNA
ctccaaaccctagattta

SEQ ID NO: 18515 - DNA, 18 bp, synthetic construct
  source 1..18: mol_type = other DNA; mol_type = other DNA
ctccaaaccctaaattta

SEQ ID NO: 18516 - DNA, 18 bp, synthetic construct
  source 1..18: mol_type = other DNA; mol_type = other DNA
actccaaaccctaggttt

SEQ ID NO: 18517 - DNA, 18 bp, synthetic construct
  source 1..18: mol_type = other DNA; mol_type = other DNA
actccaaaccctagattt

SEQ ID NO: 18518 - DNA, 18 bp, synthetic construct
  source 1..18: mol_type = other DNA; mol_type = other DNA
actccaaaccctaaattt

SEQ ID NO: 18519 - DNA, 18 bp, synthetic construct
  source 1..18: mol_type = other DNA; mol_type = other DNA
gactccaaaccctaggtt

SEQ ID NO: 18520 - DNA, 18 bp, synthetic construct
  source 1..18: mol_type = other DNA; mol_type = other DNA
gactccaaaccctagatt

SEQ ID NO: 18521 - DNA, 18 bp, synthetic construct
  source 1..18: mol_type = other DNA; mol_type = other DNA
gactccaaaccctaaatt

SEQ ID NO: 18522 - DNA, 18 bp, synthetic construct
  source 1..18: mol_type = other DNA; mol_type = other DNA
agactccaaaccctaggt

SEQ ID NO: 18523 - DNA, 18 bp, synthetic construct
  source 1..18: mol_type = other DNA; mol_type = other DNA
agactccaaaccctagat

SEQ ID NO: 18524 - DNA, 18 bp, synthetic construct
  source 1..18: mol_type = other DNA; mol_type = other DNA
agactccaaaccctaaat

SEQ ID NO: 18525 - DNA, 18 bp, synthetic construct
  source 1..18: mol_type = other DNA; mol_type = other DNA
cagactccaaaccctagg

SEQ ID NO: 18526 - DNA, 18 bp, synthetic construct
  source 1..18: mol_type = other DNA; mol_type = other DNA
cagactccaaaccctaga

SEQ ID NO: 18527 - DNA, 18 bp, synthetic construct
  source 1..18: mol_type = other DNA; mol_type = other DNA
cagactccaaaccctaaa

SEQ ID NO: 18528 - DNA, 18 bp, synthetic construct
  source 1..18: mol_type = other DNA; mol_type = other DNA
ccagactccaaaccctag

SEQ ID NO: 18529 - DNA, 18 bp, synthetic construct
  source 1..18: mol_type = other DNA; mol_type = other DNA
ccagactccaaaccctaa

SEQ ID NO: 18530 - DNA, 18 bp, synthetic construct
  source 1..18: mol_type = other DNA; mol_type = other DNA
ccaaactccaaaccctaa

SEQ ID NO: 18531 - DNA, 18 bp, synthetic construct
  source 1..18: mol_type = other DNA; mol_type = other DNA
tccagactccaaacccta

SEQ ID NO: 18532 - DNA, 18 bp, synthetic construct
  source 1..18: mol_type = other DNA; mol_type = other DNA
tccaaactccaaacccta

SEQ ID NO: 18533 - DNA, 18 bp, synthetic construct
  source 1..18: mol_type = other DNA; mol_type = other DNA
gtccagactccaaaccct

SEQ ID NO: 18534 - DNA, 18 bp, synthetic construct
  source 1..18: mol_type = other DNA; mol_type = other DNA
gtccaaactccaaaccct

SEQ ID NO: 18535 - DNA, 18 bp, synthetic construct
  source 1..18: mol_type = other DNA; mol_type = other DNA
atccaaactccaaaccct

SEQ ID NO: 18536 - DNA, 18 bp, synthetic construct
  source 1..18: mol_type = other DNA; mol_type = other DNA
agtccagactccaaaccc

SEQ ID NO: 18537 - DNA, 18 bp, synthetic construct
  source 1..18: mol_type = other DNA; mol_type = other DNA
agtccaaactccaaaccc

SEQ ID NO: 18538 - DNA, 18 bp, synthetic construct
  source 1..18: mol_type = other DNA; mol_type = other DNA
aatccaaactccaaaccc

SEQ ID NO: 18539 - DNA, 18 bp, synthetic construct
  source 1..18: mol_type = other DNA; mol_type = other DNA
tagtccagactccaaacc

SEQ ID NO: 18540 - DNA, 18 bp, synthetic construct
  source 1..18: mol_type = other DNA; mol_type = other DNA
tagtccaaactccaaacc

SEQ ID NO: 18541 - DNA, 18 bp, synthetic construct
  source 1..18: mol_type = other DNA; mol_type = other DNA
taatccaaactccaaacc

SEQ ID NO: 18542 - DNA, 18 bp, synthetic construct
  source 1..18: mol_type = other DNA; mol_type = other DNA
ttagtccagactccaaac

SEQ ID NO: 18543 - DNA, 18 bp, synthetic construct
  source 1..18: mol_type = other DNA; mol_type = other DNA
ttagtccaaactccaaac

SEQ ID NO: 18544 - DNA, 18 bp, synthetic construct
  source 1..18: mol_type = other DNA; mol_type = other DNA
ttaatccaaactccaaac

SEQ ID NO: 18545 - DNA, 18 bp, synthetic construct
  source 1..18: mol_type = other DNA; mol_type = other DNA
cttagtccagactccaaa

SEQ ID NO: 18546 - DNA, 18 bp, synthetic construct
  source 1..18: mol_type = other DNA; mol_type = other DNA
cttagtccaaactccaaa

SEQ ID NO: 18547 - DNA, 18 bp, synthetic construct
  source 1..18: mol_type = other DNA; mol_type = other DNA
cttaatccaaactccaaa

SEQ ID NO: 18548 - DNA, 18 bp, synthetic construct
  source 1..18: mol_type = other DNA; mol_type = other DNA
gcttagtccagactccaa

SEQ ID NO: 18549 - DNA, 18 bp, synthetic construct
  source 1..18: mol_type = other DNA; mol_type = other DNA
gcttagtccaaactccaa

SEQ ID NO: 18550 - DNA, 18 bp, synthetic construct
  source 1..18: mol_type = other DNA; mol_type = other DNA
gcttaatccaaactccaa

SEQ ID NO: 18551 - DNA, 18 bp, synthetic construct
  source 1..18: mol_type = other DNA; mol_type = other DNA
agcttagtccagactcca

SEQ ID NO: 18552 - DNA, 18 bp, synthetic construct
  source 1..18: mol_type = other DNA; mol_type = other DNA
agcttagtccaaactcca

SEQ ID NO: 18553 - DNA, 18 bp, synthetic construct
  source 1..18: mol_type = other DNA; mol_type = other DNA
agcttaatccaaactcca

SEQ ID NO: 18554 - DNA, 18 bp, synthetic construct
  source 1..18: mol_type = other DNA; mol_type = other DNA
gagcttagtccagactcc

SEQ ID NO: 18555 - DNA, 18 bp, synthetic construct
  source 1..18: mol_type = other DNA; mol_type = other DNA
gagcttagtccaaactcc

SEQ ID NO: 18556 - DNA, 18 bp, synthetic construct
  source 1..18: mol_type = other DNA; mol_type = other DNA
gagcttaatccaaactcc

SEQ ID NO: 18557 - DNA, 18 bp, synthetic construct
  source 1..18: mol_type = other DNA; mol_type = other DNA
ggagcttagtccagactc

SEQ ID NO: 18558 - DNA, 18 bp, synthetic construct
  source 1..18: mol_type = other DNA; mol_type = other DNA
ggagcttagtccaaactc

SEQ ID NO: 18559 - DNA, 18 bp, synthetic construct
  source 1..18: mol_type = other DNA; mol_type = other DNA
ggagcttaatccaaactc

SEQ ID NO: 18560 - DNA, 18 bp, synthetic construct
  source 1..18: mol_type = other DNA; mol_type = other DNA
tggagcttagtccagact

SEQ ID NO: 18561 - DNA, 18 bp, synthetic construct
  source 1..18: mol_type = other DNA; mol_type = other DNA
tggagcttagtccaaact

SEQ ID NO: 18562 - DNA, 18 bp, synthetic construct
  source 1..18: mol_type = other DNA; mol_type = other DNA
tggagcttaatccaaact

SEQ ID NO: 18563 - DNA, 18 bp, synthetic construct
  source 1..18: mol_type = other DNA; mol_type = other DNA
atggagcttagtccagac

SEQ ID NO: 18564 - DNA, 18 bp, synthetic construct
  source 1..18: mol_type = other DNA; mol_type = other DNA
atggagcttagtccaaac

SEQ ID NO: 18565 - DNA, 18 bp, synthetic construct
  source 1..18: mol_type = other DNA; mol_type = other DNA
atggagcttaatccaaac

SEQ ID NO: 18566 - DNA, 18 bp, synthetic construct
  source 1..18: mol_type = other DNA; mol_type = other DNA
gatggagcttagtccaga

SEQ ID NO: 18567 - DNA, 18 bp, synthetic construct
  source 1..18: mol_type = other DNA; mol_type = other DNA
gatggagcttagtccaaa

SEQ ID NO: 18568 - DNA, 18 bp, synthetic construct
  source 1..18: mol_type = other DNA; mol_type = other DNA
gatggagcttaatccaaa

SEQ ID NO: 18569 - DNA, 18 bp, synthetic construct
  source 1..18: mol_type = other DNA; mol_type = other DNA
ggatggagcttagtccag

SEQ ID NO: 18570 - DNA, 18 bp, synthetic construct
  source 1..18: mol_type = other DNA; mol_type = other DNA
ggatggagcttagtccaa

SEQ ID NO: 18571 - DNA, 18 bp, synthetic construct
  source 1..18: mol_type = other DNA; mol_type = other DNA
ggatggagcttaatccaa

SEQ ID NO: 18572 - DNA, 18 bp, synthetic construct
  source 1..18: mol_type = other DNA; mol_type = other DNA
tggatggagcttagtcca

SEQ ID NO: 18573 - DNA, 18 bp, synthetic construct
  source 1..18: mol_type = other DNA; mol_type = other DNA
tggatggagcttaatcca

SEQ ID NO: 18574 - DNA, 18 bp, synthetic construct
  source 1..18: mol_type = other DNA; mol_type = other DNA
tggatggaacttaatcca

SEQ ID NO: 18575 - DNA, 18 bp, synthetic construct
  source 1..18: mol_type = other DNA; mol_type = other DNA
gtggatggagcttagtcc

SEQ ID NO: 18576 - DNA, 18 bp, synthetic construct
  source 1..18: mol_type = other DNA; mol_type = other DNA
gtggatggagcttaatcc

SEQ ID NO: 18577 - DNA, 18 bp, synthetic construct
  source 1..18: mol_type = other DNA; mol_type = other DNA
gtggatggaacttaatcc

SEQ ID NO: 18578 - DNA, 18 bp, synthetic construct
  source 1..18: mol_type = other DNA; mol_type = other DNA
cgtggatggagcttagtc

SEQ ID NO: 18579 - DNA, 18 bp, synthetic construct
  source 1..18: mol_type = other DNA; mol_type = other DNA
cgtggatggagcttaatc

SEQ ID NO: 18580 - DNA, 18 bp, synthetic construct
  source 1..18: mol_type = other DNA; mol_type = other DNA
cgtggatggaacttaatc

SEQ ID NO: 18581 - DNA, 18 bp, synthetic construct
  source 1..18: mol_type = other DNA; mol_type = other DNA
acgtggatggagcttagt

SEQ ID NO: 18582 - DNA, 18 bp, synthetic construct
  source 1..18: mol_type = other DNA; mol_type = other DNA
acgtggatggagcttaat

SEQ ID NO: 18583 - DNA, 18 bp, synthetic construct
  source 1..18: mol_type = other DNA; mol_type = other DNA
acgtggatggaacttaat

SEQ ID NO: 18584 - DNA, 18 bp, synthetic construct
  source 1..18: mol_type = other DNA; mol_type = other DNA
gacgtggatggagcttag

SEQ ID NO: 18585 - DNA, 18 bp, synthetic construct
  source 1..18: mol_type = other DNA; mol_type = other DNA
gacgtggatggagcttaa

SEQ ID NO: 18586 - DNA, 18 bp, synthetic construct
  source 1..18: mol_type = other DNA; mol_type = other DNA
gacgtggatggaacttaa

SEQ ID NO: 18587 - DNA, 18 bp, synthetic construct
  source 1..18: mol_type = other DNA; mol_type = other DNA
tgacgtggatggagctta

SEQ ID NO: 18588 - DNA, 18 bp, synthetic construct
  source 1..18: mol_type = other DNA; mol_type = other DNA
tgacgtggatggaactta

SEQ ID NO: 18589 - DNA, 18 bp, synthetic construct
  source 1..18: mol_type = other DNA; mol_type = other DNA
tgacgtggatgaaactta

SEQ ID NO: 18590 - DNA, 18 bp, synthetic construct
  source 1..18: mol_type = other DNA; mol_type = other DNA
gtgacgtggatggagctt

SEQ ID NO: 18591 - DNA, 18 bp, synthetic construct
  source 1..18: mol_type = other DNA; mol_type = other DNA
gtgacgtggatggaactt

SEQ ID NO: 18592 - DNA, 18 bp, synthetic construct
  source 1..18: mol_type = other DNA; mol_type = other DNA
agtgacgtggatggagct

SEQ ID NO: 18593 - DNA, 18 bp, synthetic construct
  source 1..18: mol_type = other DNA; mol_type = other DNA
agtgacgtggatggaact

SEQ ID NO: 18594 - DNA, 18 bp, synthetic construct
  source 1..18: mol_type = other DNA; mol_type = other DNA
gagtgacgtggatggagc

SEQ ID NO: 18595 - DNA, 18 bp, synthetic construct
  source 1..18: mol_type = other DNA; mol_type = other DNA
gagtgacgtggatggaac

SEQ ID NO: 18596 - DNA, 18 bp, synthetic construct
  source 1..18: mol_type = other DNA; mol_type = other DNA
tgagtgacgtggatggag

SEQ ID NO: 18597 - DNA, 18 bp, synthetic construct
  source 1..18: mol_type = other DNA; mol_type = other DNA
tgagtgacgtggatggaa

SEQ ID NO: 18598 - DNA, 18 bp, synthetic construct
  source 1..18: mol_type = other DNA; mol_type = other DNA
gtgagtgacgtggatgga

SEQ ID NO: 18599 - DNA, 18 bp, synthetic construct
  source 1..18: mol_type = other DNA; mol_type = other DNA
gtgagtgacgtggatgaa

SEQ ID NO: 18600 - DNA, 18 bp, synthetic construct
  source 1..18: mol_type = other DNA; mol_type = other DNA
tgtgagtgacgtggatgg

SEQ ID NO: 18601 - DNA, 18 bp, synthetic construct
  source 1..18: mol_type = other DNA; mol_type = other DNA
tgtgagtgacgtggatga

SEQ ID NO: 18602 - DNA, 18 bp, synthetic construct
  source 1..18: mol_type = other DNA; mol_type = other DNA
ttgtgagtgacgtggatg

SEQ ID NO: 18603 - DNA, 18 bp, synthetic construct
  source 1..18: mol_type = other DNA; mol_type = other DNA
ttgtgagtgacgtggata

SEQ ID NO: 18604 - DNA, 18 bp, synthetic construct
  source 1..18: mol_type = other DNA; mol_type = other DNA
cttgtgagtgacgtggat

SEQ ID NO: 18605 - DNA, 18 bp, synthetic construct
  source 1..18: mol_type = other DNA; mol_type = other DNA
cttgtgagtgacgtgaat

SEQ ID NO: 18606 - DNA, 18 bp, synthetic construct
  source 1..18: mol_type = other DNA; mol_type = other DNA
acttgtgagtgacgtgga

SEQ ID NO: 18607 - DNA, 18 bp, synthetic construct
  source 1..18: mol_type = other DNA; mol_type = other DNA
acttgtgagtgacgtgaa

SEQ ID NO: 18608 - DNA, 18 bp, synthetic construct
  source 1..18: mol_type = other DNA; mol_type = other DNA
aacttgtgagtgacgtgg

SEQ ID NO: 18609 - DNA, 18 bp, synthetic construct
  source 1..18: mol_type = other DNA; mol_type = other DNA
aacttgtgagtgacgtga

SEQ ID NO: 18610 - DNA, 18 bp, synthetic construct
  source 1..18: mol_type = other DNA; mol_type = other DNA
aaacttgtgagtgacgtg

SEQ ID NO: 18611 - DNA, 18 bp, synthetic construct
  source 1..18: mol_type = other DNA; mol_type = other DNA
aaacttgtgagtgacgta

SEQ ID NO: 18612 - DNA, 18 bp, synthetic construct
  source 1..18: mol_type = other DNA; mol_type = other DNA
gaaacttgtgagtgacgt

SEQ ID NO: 18613 - DNA, 18 bp, synthetic construct
  source 1..18: mol_type = other DNA; mol_type = other DNA
gaaacttgtgagtgacat

SEQ ID NO: 18614 - DNA, 18 bp, synthetic construct
  source 1..18: mol_type = other DNA; mol_type = other DNA
agaaacttgtgagtgacg

SEQ ID NO: 18615 - DNA, 18 bp, synthetic construct
  source 1..18: mol_type = other DNA; mol_type = other DNA
agaaacttgtgagtgaca

SEQ ID NO: 18616 - DNA, 18 bp, synthetic construct
  source 1..18: mol_type = other DNA; mol_type = other DNA
cagaaacttgtgagtgac

SEQ ID NO: 18617 - DNA, 18 bp, synthetic construct
  source 1..18: mol_type = other DNA; mol_type = other DNA
cagaaacttgtgagtaac

SEQ ID NO: 18618 - DNA, 18 bp, synthetic construct
  source 1..18: mol_type = other DNA; mol_type = other DNA
acagaaacttgtgagtga

SEQ ID NO: 18619 - DNA, 18 bp, synthetic construct
  source 1..18: mol_type = other DNA; mol_type = other DNA
acagaaacttgtgagtaa

SEQ ID NO: 18620 - DNA, 18 bp, synthetic construct
  source 1..18: mol_type = other DNA; mol_type = other DNA
aacagaaacttgtgagtg

SEQ ID NO: 18621 - DNA, 18 bp, synthetic construct
  source 1..18: mol_type = other DNA; mol_type = other DNA
aacagaaacttgtgagta

SEQ ID NO: 18622 - DNA, 18 bp, synthetic construct
  source 1..18: mol_type = other DNA; mol_type = other DNA
aaacagaaacttgtgagt

SEQ ID NO: 18623 - DNA, 18 bp, synthetic construct
  source 1..18: mol_type = other DNA; mol_type = other DNA
aaacagaaacttgtgaat

SEQ ID NO: 18624 - DNA, 18 bp, synthetic construct
  source 1..18: mol_type = other DNA; mol_type = other DNA
taaacagaaacttgtgag

SEQ ID NO: 18625 - DNA, 18 bp, synthetic construct
  source 1..18: mol_type = other DNA; mol_type = other DNA
taaacagaaacttgtgaa

SEQ ID NO: 18626 - DNA, 18 bp, synthetic construct
  source 1..18: mol_type = other DNA; mol_type = other DNA
ataaacagaaacttgtga

SEQ ID NO: 18627 - DNA, 18 bp, synthetic construct
  source 1..18: mol_type = other DNA; mol_type = other DNA
ataaacagaaacttgtaa

SEQ ID NO: 18628 - DNA, 18 bp, synthetic construct
  source 1..18: mol_type = other DNA; mol_type = other DNA
tataaacagaaacttgtg

SEQ ID NO: 18629 - DNA, 18 bp, synthetic construct
  source 1..18: mol_type = other DNA; mol_type = other DNA
tataaacagaaacttgta

SEQ ID NO: 18630 - DNA, 18 bp, synthetic construct
  source 1..18: mol_type = other DNA; mol_type = other DNA
atataaacagaaacttgt

SEQ ID NO: 18631 - DNA, 18 bp, synthetic construct
  source 1..18: mol_type = other DNA; mol_type = other DNA
atataaacagaaacttat

SEQ ID NO: 18632 - DNA, 18 bp, synthetic construct
  source 1..18: mol_type = other DNA; mol_type = other DNA
aatataaacagaaacttg

SEQ ID NO: 18633 - DNA, 18 bp, synthetic construct
  source 1..18: mol_type = other DNA; mol_type = other DNA
aatataaacagaaactta

SEQ ID NO: 18634 - DNA, 18 bp, synthetic construct
  source 1..18: mol_type = other DNA; mol_type = other DNA
aaatataaacagaaactt

SEQ ID NO: 18635 - DNA, 18 bp, synthetic construct
  source 1..18: mol_type = other DNA; mol_type = other DNA
aaatataaacaaaaactt

SEQ ID NO: 18636 - DNA, 18 bp, synthetic construct
  source 1..18: mol_type = other DNA; mol_type = other DNA
gaaatataaacagaaact

SEQ ID NO: 18637 - DNA, 18 bp, synthetic construct
  source 1..18: mol_type = other DNA; mol_type = other DNA
gaaatataaacaaaaact

SEQ ID NO: 18638 - DNA, 18 bp, synthetic construct
  source 1..18: mol_type = other DNA; mol_type = other DNA
agaaatataaacagaaac

SEQ ID NO: 18639 - DNA, 18 bp, synthetic construct
  source 1..18: mol_type = other DNA; mol_type = other DNA
agaaatataaacaaaaac

SEQ ID NO: 18640 - DNA, 18 bp, synthetic construct
  source 1..18: mol_type = other DNA; mol_type = other DNA
tagaaatataaacagaaa

SEQ ID NO: 18641 - DNA, 18 bp, synthetic construct
  source 1..18: mol_type = other DNA; mol_type = other DNA
tagaaatataaacaaaaa

SEQ ID NO: 18642 - DNA, 18 bp, synthetic construct
  source 1..18: mol_type = other DNA; mol_type = other DNA
ctagaaatataaacagaa

SEQ ID NO: 18643 - DNA, 18 bp, synthetic construct
  source 1..18: mol_type = other DNA; mol_type = other DNA
ctagaaatataaacaaaa

SEQ ID NO: 18644 - DNA, 18 bp, synthetic construct
  source 1..18: mol_type = other DNA; mol_type = other DNA
gctagaaatataaacaga

SEQ ID NO: 18645 - DNA, 18 bp, synthetic construct
  source 1..18: mol_type = other DNA; mol_type = other DNA
gctagaaatataaacaaa

SEQ ID NO: 18646 - DNA, 18 bp, synthetic construct
  source 1..18: mol_type = other DNA; mol_type = other DNA
agctagaaatataaacag

SEQ ID NO: 18647 - DNA, 18 bp, synthetic construct
  source 1..18: mol_type = other DNA; mol_type = other DNA
agctagaaatataaacaa

SEQ ID NO: 18648 - DNA, 18 bp, synthetic construct
  source 1..18: mol_type = other DNA; mol_type = other DNA
aagctagaaatataaaca

SEQ ID NO: 18649 - DNA, 18 bp, synthetic construct
  source 1..18: mol_type = other DNA; mol_type = other DNA
aagctaaaaatataaaca

SEQ ID NO: 18650 - DNA, 18 bp, synthetic construct
  source 1..18: mol_type = other DNA; mol_type = other DNA
aaagctagaaatataaac

SEQ ID NO: 18651 - DNA, 18 bp, synthetic construct
  source 1..18: mol_type = other DNA; mol_type = other DNA
aaagctaaaaatataaac

SEQ ID NO: 18652 - DNA, 18 bp, synthetic construct
  source 1..18: mol_type = other DNA; mol_type = other DNA
aaaagctagaaatataaa

SEQ ID NO: 18653 - DNA, 18 bp, synthetic construct
  source 1..18: mol_type = other DNA; mol_type = other DNA
aaaagctaaaaatataaa

SEQ ID NO: 18654 - DNA, 18 bp, synthetic construct
  source 1..18: mol_type = other DNA; mol_type = other DNA
aaaaagctagaaatataa

SEQ ID NO: 18655 - DNA, 18 bp, synthetic construct
  source 1..18: mol_type = other DNA; mol_type = other DNA
aaaaagctaaaaatataa

SEQ ID NO: 18656 - DNA, 18 bp, synthetic construct
  source 1..18: mol_type = other DNA; mol_type = other DNA
aaaaaagctagaaatata

SEQ ID NO: 18657 - DNA, 18 bp, synthetic construct
  source 1..18: mol_type = other DNA; mol_type = other DNA
aaaaaagctaaaaatata

SEQ ID NO: 18658 - DNA, 18 bp, synthetic construct
  source 1..18: mol_type = other DNA; mol_type = other DNA
aaaaaaagctagaaatat

SEQ ID NO: 18659 - DNA, 18 bp, synthetic construct
  source 1..18: mol_type = other DNA; mol_type = other DNA
aaaaaaagctaaaaatat

SEQ ID NO: 18660 - DNA, 18 bp, synthetic construct
  source 1..18: mol_type = other DNA; mol_type = other DNA
taaaaaaagctagaaata

SEQ ID NO: 18661 - DNA, 18 bp, synthetic construct
  source 1..18: mol_type = other DNA; mol_type = other DNA
taaaaaaagctaaaaata

SEQ ID NO: 18662 - DNA, 18 bp, synthetic construct
  source 1..18: mol_type = other DNA; mol_type = other DNA
ttaaaaaaagctagaaat

SEQ ID NO: 18663 - DNA, 18 bp, synthetic construct
  source 1..18: mol_type = other DNA; mol_type = other DNA
ttaaaaaaagctaaaaat

SEQ ID NO: 18664 - DNA, 18 bp, synthetic construct
  source 1..18: mol_type = other DNA; mol_type = other DNA
attaaaaaaagctagaaa

SEQ ID NO: 18665 - DNA, 18 bp, synthetic construct
  source 1..18: mol_type = other DNA; mol_type = other DNA
attaaaaaaagctaaaaa

SEQ ID NO: 18666 - DNA, 18 bp, synthetic construct
  source 1..18: mol_type = other DNA; mol_type = other DNA
ggcgggagtgagggtggg

SEQ ID NO: 18667 - DNA, 18 bp, synthetic construct
  source 1..18: mol_type = other DNA; mol_type = other DNA
ggcgggagtggaggtggg

SEQ ID NO: 18668 - DNA, 18 bp, synthetic construct
  source 1..18: mol_type = other DNA; mol_type = other DNA
ggcgggagtgggagtggg

SEQ ID NO: 18669 - DNA, 18 bp, synthetic construct
  source 1..18: mol_type = other DNA; mol_type = other DNA
gggcgggagtgagggtgg

SEQ ID NO: 18670 - DNA, 18 bp, synthetic construct
  source 1..18: mol_type = other DNA; mol_type = other DNA
gggcgggagtggaggtgg

SEQ ID NO: 18671 - DNA, 18 bp, synthetic construct
  source 1..18: mol_type = other DNA; mol_type = other DNA
gggcgggagtgggagtgg

SEQ ID NO: 18672 - DNA, 18 bp, synthetic construct
  source 1..18: mol_type = other DNA; mol_type = other DNA
ggccagggcgggagtggg

SEQ ID NO: 18673 - DNA, 18 bp, synthetic construct
  source 1..18: mol_type = other DNA; mol_type = other DNA
ggccgaggcgggagtggg

SEQ ID NO: 18674 - DNA, 18 bp, synthetic construct
  source 1..18: mol_type = other DNA; mol_type = other DNA
ggccggagcgggagtggg

SEQ ID NO: 18675 - DNA, 18 bp, synthetic construct
  source 1..18: mol_type = other DNA; mol_type = other DNA
ggccgggacgggagtggg

SEQ ID NO: 18676 - DNA, 18 bp, synthetic construct
  source 1..18: mol_type = other DNA; mol_type = other DNA
cggccagggcgggagtgg

SEQ ID NO: 18677 - DNA, 18 bp, synthetic construct
  source 1..18: mol_type = other DNA; mol_type = other DNA
cggccgaggcgggagtgg

SEQ ID NO: 18678 - DNA, 18 bp, synthetic construct
  source 1..18: mol_type = other DNA; mol_type = other DNA
cggccggagcgggagtgg

SEQ ID NO: 18679 - DNA, 18 bp, synthetic construct
  source 1..18: mol_type = other DNA; mol_type = other DNA
cggccgggacgggagtgg

SEQ ID NO: 18680 - DNA, 18 bp, synthetic construct
  source 1..18: mol_type = other DNA; mol_type = other DNA
acggcctgggcgggagtg

SEQ ID NO: 18681 - DNA, 18 bp, synthetic construct
  source 1..18: mol_type = other DNA; mol_type = other DNA
acggccgtggcgggagtg

SEQ ID NO: 18682 - DNA, 18 bp, synthetic construct
  source 1..18: mol_type = other DNA; mol_type = other DNA
acggccggtgcgggagtg

SEQ ID NO: 18683 - DNA, 18 bp, synthetic construct
  source 1..18: mol_type = other DNA; mol_type = other DNA
acggccgggtcgggagtg

SEQ ID NO: 18684 - DNA, 18 bp, synthetic construct
  source 1..18: mol_type = other DNA; mol_type = other DNA
cacggcctgggcgggagt

SEQ ID NO: 18685 - DNA, 18 bp, synthetic construct
  source 1..18: mol_type = other DNA; mol_type = other DNA
cacggccgtggcgggagt

SEQ ID NO: 18686 - DNA, 18 bp, synthetic construct
  source 1..18: mol_type = other DNA; mol_type = other DNA
cacggccggtgcgggagt

SEQ ID NO: 18687 - DNA, 18 bp, synthetic construct
  source 1..18: mol_type = other DNA; mol_type = other DNA
cacggccgggtcgggagt

SEQ ID NO: 18688 - DNA, 18 bp, synthetic construct
  source 1..18: mol_type = other DNA; mol_type = other DNA
gcacggcctgggcgggag

SEQ ID NO: 18689 - DNA, 18 bp, synthetic construct
  source 1..18: mol_type = other DNA; mol_type = other DNA
gcacggccgtggcgggag

SEQ ID NO: 18690 - DNA, 18 bp, synthetic construct
  source 1..18: mol_type = other DNA; mol_type = other DNA
gcacggccggtgcgggag

SEQ ID NO: 18691 - DNA, 18 bp, synthetic construct
  source 1..18: mol_type = other DNA; mol_type = other DNA
gcacggccgggtcgggag

SEQ ID NO: 18692 - DNA, 18 bp, synthetic construct
  source 1..18: mol_type = other DNA; mol_type = other DNA
ggcacggcctgggcggga

SEQ ID NO: 18693 - DNA, 18 bp, synthetic construct
  source 1..18: mol_type = other DNA; mol_type = other DNA
ggcacggccgtggcggga

SEQ ID NO: 18694 - DNA, 18 bp, synthetic construct
  source 1..18: mol_type = other DNA; mol_type = other DNA
ggcacggccggtgcggga

SEQ ID NO: 18695 - DNA, 18 bp, synthetic construct
  source 1..18: mol_type = other DNA; mol_type = other DNA
ggcacggccgggtcggga

SEQ ID NO: 18696 - DNA, 18 bp, synthetic construct
  source 1..18: mol_type = other DNA; mol_type = other DNA
gggcacggcctgggcggg

SEQ ID NO: 18697 - DNA, 18 bp, synthetic construct
  source 1..18: mol_type = other DNA; mol_type = other DNA
gggcacggccgtggcggg

SEQ ID NO: 18698 - DNA, 18 bp, synthetic construct
  source 1..18: mol_type = other DNA; mol_type = other DNA
gggcacggccggtgcggg

SEQ ID NO: 18699 - DNA, 18 bp, synthetic construct
  source 1..18: mol_type = other DNA; mol_type = other DNA
gggcacggccgggtcggg

SEQ ID NO: 18700 - DNA, 18 bp, synthetic construct
  source 1..18: mol_type = other DNA; mol_type = other DNA
agggcacggcctgggcgg

SEQ ID NO: 18701 - DNA, 18 bp, synthetic construct
  source 1..18: mol_type = other DNA; mol_type = other DNA
agggcacggccgtggcgg

SEQ ID NO: 18702 - DNA, 18 bp, synthetic construct
  source 1..18: mol_type = other DNA; mol_type = other DNA
agggcacggccggtgcgg

SEQ ID NO: 18703 - DNA, 18 bp, synthetic construct
  source 1..18: mol_type = other DNA; mol_type = other DNA
agggcacggccgggtcgg

SEQ ID NO: 18704 - DNA, 18 bp, synthetic construct
  source 1..18: mol_type = other DNA; mol_type = other DNA
cagggcacggcctgggcg

SEQ ID NO: 18705 - DNA, 18 bp, synthetic construct
  source 1..18: mol_type = other DNA; mol_type = other DNA
cagggcacggccgtggcg

SEQ ID NO: 18706 - DNA, 18 bp, synthetic construct
  source 1..18: mol_type = other DNA; mol_type = other DNA
cagggcacggccggtgcg

SEQ ID NO: 18707 - DNA, 18 bp, synthetic construct
  source 1..18: mol_type = other DNA; mol_type = other DNA
cagggcacggccgggtcg

SEQ ID NO: 18708 - DNA, 18 bp, synthetic construct
  source 1..18: mol_type = other DNA; mol_type = other DNA
gcagggcacggccgggac

SEQ ID NO: 18709 - DNA, 18 bp, synthetic construct
  source 1..18: mol_type = other DNA; mol_type = other DNA
ggcagggcacggccggga

SEQ ID NO: 18710 - DNA, 18 bp, synthetic construct
  source 1..18: mol_type = other DNA; mol_type = other DNA
cggcagggcacggccggg

SEQ ID NO: 18711 - DNA, 18 bp, synthetic construct
  source 1..18: mol_type = other DNA; mol_type = other DNA
cggcagggcacggccgga

SEQ ID NO: 18712 - DNA, 18 bp, synthetic construct
  source 1..18: mol_type = other DNA; mol_type = other DNA
ccggcagggcacggccgg

SEQ ID NO: 18713 - DNA, 18 bp, synthetic construct
  source 1..18: mol_type = other DNA; mol_type = other DNA
ccggcagggcacggccga

SEQ ID NO: 18714 - DNA, 18 bp, synthetic construct
  source 1..18: mol_type = other DNA; mol_type = other DNA
gccggcagggcacggccg

SEQ ID NO: 18715 - DNA, 18 bp, synthetic construct
  source 1..18: mol_type = other DNA; mol_type = other DNA
gccggcagggcacggcca

SEQ ID NO: 18716 - DNA, 18 bp, synthetic construct
  source 1..18: mol_type = other DNA; mol_type = other DNA
tgccggcagggcacggcc

SEQ ID NO: 18717 - DNA, 18 bp, synthetic construct
  source 1..18: mol_type = other DNA; mol_type = other DNA
tgccggcagggcacgacc

SEQ ID NO: 18718 - DNA, 18 bp, synthetic construct
  source 1..18: mol_type = other DNA; mol_type = other DNA
ctgccggcagggcacggc

SEQ ID NO: 18719 - DNA, 18 bp, synthetic construct
  source 1..18: mol_type = other DNA; mol_type = other DNA
ctgccggcagggcacgac

SEQ ID NO: 18720 - DNA, 18 bp, synthetic construct
  source 1..18: mol_type = other DNA; mol_type = other DNA
cctgccggcagggcacgg

SEQ ID NO: 18721 - DNA, 18 bp, synthetic construct
  source 1..18: mol_type = other DNA; mol_type = other DNA
cctgccggcagggcacga

SEQ ID NO: 18722 - DNA, 18 bp, synthetic construct
  source 1..18: mol_type = other DNA; mol_type = other DNA
ccctgccggcagggcacg

SEQ ID NO: 18723 - DNA, 18 bp, synthetic construct
  source 1..18: mol_type = other DNA; mol_type = other DNA
ccctgccggcagggcaca

SEQ ID NO: 18724 - DNA, 18 bp, synthetic construct
  source 1..18: mol_type = other DNA; mol_type = other DNA
gccctgccggcagggcac

SEQ ID NO: 18725 - DNA, 18 bp, synthetic construct
  source 1..18: mol_type = other DNA; mol_type = other DNA
gccctgccggcaggacac

SEQ ID NO: 18726 - DNA, 18 bp, synthetic construct
  source 1..18: mol_type = other DNA; mol_type = other DNA
ggccctgccggcagggca

SEQ ID NO: 18727 - DNA, 18 bp, synthetic construct
  source 1..18: mol_type = other DNA; mol_type = other DNA
ggccctgccggcaggaca

SEQ ID NO: 18728 - DNA, 18 bp, synthetic construct
  source 1..18: mol_type = other DNA; mol_type = other DNA
gggccctgccggcagggc

SEQ ID NO: 18729 - DNA, 18 bp, synthetic construct
  source 1..18: mol_type = other DNA; mol_type = other DNA
gggccctgccggcaggac

SEQ ID NO: 18730 - DNA, 18 bp, synthetic construct
  source 1..18: mol_type = other DNA; mol_type = other DNA
agggccctgccggcaggg

SEQ ID NO: 18731 - DNA, 18 bp, synthetic construct
  source 1..18: mol_type = other DNA; mol_type = other DNA
gaggccctgccggcaggg

SEQ ID NO: 18732 - DNA, 18 bp, synthetic construct
  source 1..18: mol_type = other DNA; mol_type = other DNA
ggagccctgccggcaggg

SEQ ID NO: 18733 - DNA, 18 bp, synthetic construct
  source 1..18: mol_type = other DNA; mol_type = other DNA
gggaccctgccggcaggg

SEQ ID NO: 18734 - DNA, 18 bp, synthetic construct
  source 1..18: mol_type = other DNA; mol_type = other DNA
gagggccctgccggcagg

SEQ ID NO: 18735 - DNA, 18 bp, synthetic construct
  source 1..18: mol_type = other DNA; mol_type = other DNA
ggaggccctgccggcagg

SEQ ID NO: 18736 - DNA, 18 bp, synthetic construct
  source 1..18: mol_type = other DNA; mol_type = other DNA
gggagccctgccggcagg

SEQ ID NO: 18737 - DNA, 18 bp, synthetic construct
  source 1..18: mol_type = other DNA; mol_type = other DNA
ggagggccctgccggcag

SEQ ID NO: 18738 - DNA, 18 bp, synthetic construct
  source 1..18: mol_type = other DNA; mol_type = other DNA
gggaggccctgccggcag

SEQ ID NO: 18739 - DNA, 18 bp, synthetic construct
  source 1..18: mol_type = other DNA; mol_type = other DNA
tggagggccctgccggca

SEQ ID NO: 18740 - DNA, 18 bp, synthetic construct
  source 1..18: mol_type = other DNA; mol_type = other DNA
tgggaggccctgccggca

SEQ ID NO: 18741 - DNA, 18 bp, synthetic construct
  source 1..18: mol_type = other DNA; mol_type = other DNA
gtggagggccctgccggc

SEQ ID NO: 18742 - DNA, 18 bp, synthetic construct
  source 1..18: mol_type = other DNA; mol_type = other DNA
gtgggaggccctgccggc

SEQ ID NO: 18743 - DNA, 18 bp, synthetic construct
  source 1..18: mol_type = other DNA; mol_type = other DNA
ggtggagggccctgccgg

SEQ ID NO: 18744 - DNA, 18 bp, synthetic construct
  source 1..18: mol_type = other DNA; mol_type = other DNA
ggtgggaggccctgccgg

SEQ ID NO: 18745 - DNA, 18 bp, synthetic construct
  source 1..18: mol_type = other DNA; mol_type = other DNA
gggtggagggccctgccg

SEQ ID NO: 18746 - DNA, 18 bp, synthetic construct
  source 1..18: mol_type = other DNA; mol_type = other DNA
ggcctcaggactggagca

SEQ ID NO: 18747 - DNA, 18 bp, synthetic construct
  source 1..18: mol_type = other DNA; mol_type = other DNA
gtcaggaggcctcaggac

SEQ ID NO: 18748 - DNA, 18 bp, synthetic construct
  source 1..18: mol_type = other DNA; mol_type = other DNA
gtatcacaacgtcagggt

SEQ ID NO: 18749 - DNA, 18 bp, synthetic construct
  source 1..18: mol_type = other DNA; mol_type = other DNA
ataagaaacatagatctc

SEQ ID NO: 18750 - DNA, 21 bp, synthetic construct
  source 1..21: mol_type = other DNA; mol_type = other DNA
tcaataataataatataagaa

SEQ ID NO: 18751 - DNA, 32767 bp, synthetic construct
  source 1..32767: mol_type = other DNA
gcttcggccgcggttcgcggaggcgcggggtcccgggcgccggcacccgagccccggactccttcggcgggggcccggggctcggcaccccgcatggggccggcggggcgggtccgcgctcccgggacctgagctcacgagcccgctccgctgcagaagtgcctgcgcctggacccggccgcgcccgtgtgggccgccaagcagcgcgtgctctgcgccctcaaccacagcctccaggacgcgctcaactatgggcttttccagccgccctcccggggccgcgccggcaagttcctggatgaggagcggctcctgcaggagtacccgcccaacctggacacgcccctgccctacctggaggtaagtggccggcgcgggggtgagctgaggagcgcgcagggtggatcaccaagccccgtggcgggaccagtgaagggcacggcagtggggaaacacaagtgggaggggtgaggggtggaggctgtgtgtgtgtgtgtgtgtgtgtgtgtgtggtgctgtgtgcagagtgcagtgagcgtgtacagggtgcagcgagcggacacagtgtatgcgatgagtaggcgcggtgtgtgcagtgagcgggcagggcgagcagtaaggatgtacagtgtgggcagtgtgcgagcatgtgtagtgagcaggcagtgtgtgcagttagcaggcacagtgtgtgcagtgagtgggcagtgtgcacagcatgtacagtgtgagtggtgtgtgctgtgtgccgtgagcatgtgtagtgagtgggcacagtgcagtcagtgtgcacaaagtatgcagtgggcacgtaccgtgtgtgcagtgagtggtgtgcagtgtgtagtgtgcagtgagcagtgtgtacagcattgcagtgtggggcagtgagtacagtgtgagtgttgtgattgtggtaagcaggatgcgcagtatacagtgaacagtgtgcacagtgtgtgcagtgtgggctgtgtgccacagagtcagtgtggtgtgtgtagtttgaacagtgtgtgcattgagcagcatggatggtgtggacgctgagcattgttctccagggaggagtgtgagcacgagagagtgccagaggggtgtgtggtgtgagcagggctatctgtgtgcacgtttgttcctttctccagctgtgaagtcttgtgaaggccaaccaagtcccctcctttactcacccatgcatggtgtgaagatgtattgagtgccttgctaggcatggggacgtagacggggtcagtcctgtggaaggtcttggagtttggcagggtggaggggggtgcccaactgcagtgggcattgaataaagattttgtgagctgagctcaaagttgggcgggcctccgtggtggcacaggaaagtggggtcagttctacctggagagtggagggggatgtctaggatggtaagcctggaatcaggccttcagagaggagtgggattttgccgagaatcctggggatgggaaggcgacgggacagtgcaggctgcgggcagctaggcacgtgccttccatcgggctgcatcatgcctgagtgtggtgggtgcatggcagctgttagctctgtccactgtggtagtatgactgatggtgtgtacaggagggcagtgaggggtgcggtgtggccagcatgagcgggacggggtttgtgcatggactcacttgctcagccggggtgggggcattttctctaccttttctttatctgagcagtttcgatacaagcggcgagtttatgcccagaacctcatcgatgataagcagtttgcaaagcttcacacaaaggtaaaggatcacggggagggggctcctgaggttccctcctgcctccctgtggctgctgtcccccaccccagcttggggctgaccacagtcccccagctttagctcagtccatttccccatcatcaggggcccagagcctgtactgggtgtggctgaagggctgggcacagattcctggccccatggttggggtcaggtggtacagtgatgtgttccagttagatcagactcttgccgacccccctggcttaggggctggagtgtcctgtgagaagctgggtggagagggagtggacaagcatctgatgtgatggctgtcgggacaaggcacccagcatcgagtggtcgaccagtgctaggcatttgtgattagacctctcattaatcctcttccagagggactattataaccctgtttcacagatggggacacagagtacccgactgtgtagacagtgaagctggggctgaacccagatctgtctgattccaggccctgtgcccaggcatgcctttgaggtgtctactgctgggtgccacccccaactgggcctgaccccaaatgctcttgaggggggcaccttactatttcccgctgaatgtcagaggggcagggtgggtgccacagcccctccccaggggcttccacccgcagctcacagtccagcaggcacttgtttgctggatactttatgggcggtctcgagctcaggagaggggtcagaatggagggtctctggagcccaggagaggaatcagaactgtcagccctgtgtcctaatggtcccatcagtgactttggagcctcaggcttctgtgccaggcttttctgctgccccagggcaggcggtggtcaacggccttggcactatggctgggcagagtccactgtggaaaggtccccctctcctgccactggccctcacttgaccttgtcagcctgggttcctaccccatggccacctctccctccggatctctcttcagtgaccaacaagacatgagtgactcactctgaagtaggtctcgtttgtttttaggatgagcctgaacttcttacatagcccgtgtttctgcttgcctgggctccagctggcctttccctctcccctggtagtgagcacttcctcctctttcactgcctggcccgcctgaggaggttgcctcccaaggcaggggtccctatggcaccctcccctatttctgaggtacactgggtgtttatggaagggccccggcctttggccagggcaccttgccttgtgtgtgtggtgtccgtagtgccggctggggaagtgaggccttgtggggtgagtgaataaactgggtgaatgagtacaaggccatcaaagtcatgtcacaggatgggtccctggggtgggggtctgcggtggggtgagctggagaggaagatgggccgaagaaggagcaggttgtctcagggtgctgaggattcagggctgctgtggggctggttcctgcctgggtggacctcgggctcttctaggccaggcaggtcggggcagcagggccggagagacggagccagggcagtgactgggcctggagtgggggacttgcttggggccccaccagggtgacctggccttggtgaggggctacttgggtacaagctgacagtcgtgactggtttggctatcagggcgcaaggaagggctttgagccgtgcatgggcccacccgagtgggaattggggccgtggtgggagtgcaggaccgtggttgacaattgtgatgtcaggtgacaggtcagactggtagggatgtggcgggggttgcctgaaggtggcctgaggcttgccggaggaaggcgggtgatgttcagatgatggaggccttggtgccaggctgactgacggccggtgttccaggcgaacctgaagaagttcatggactacgtccagctgcatagcacggacaaggtggcacgcctgttggacaaggggctggaccccaacttccatgaccctgactcaggaggtgaggagtggagtcggggaggggcatggcctttgcgcggctgggagcctgacccttatctgtctgtgaacccagagtgccccctgagcctcgcagcccagctggacaacgccacggacctgctaaaggtgctgaagaatggtggtgcccacctggacttccgcactcgcgatgggctcactgccgtgcactgtgccacacgccagcggaatgcggcagcactgacggtcagtgagggcggggcctggcctggaggggctcttgcctggtgatggggctgggggcagctgggcctggtgtggatactgaggctgctcaccctcagaccctgctggacctgggggcttcacctgactacaaggacagccgcggcttgacacccctctaccacagcgccctggggggtggggatgccctctgctgtgagctgcttctccacgaccacgctcagctggggatcaccgacgagaatggctggcaggagatccaccaggtgtgcagggagccgaggtggggtcccggcctctgtgtgctgggttgggggtcctggctctgtctgtaggggtgggggccctagcctctgcccagggaccctacagcaccttgctcttcccccaggcctgccgctttgggcacgtgcagcatctggagcacctgctgttctatggggcagacatgggggcccagaacgcctcggggaacacagccctgcacatctgtgccctctacaaccaggtgcgactgtgtgtcctgcacatgcctgcaccagcgagtgtgcatatacttgcctcttctgggggtgtatgtgtgtgtgggcacacaggtgaccctgtacggtgattgcatgtgtgcaccgagtgtggatatacttgcctgttctgggggtgtacgtgtgtttgtgtgcacacaggtgaccctgtacagtgattgcatgcgtgcaccagggagtgtggatatacttgcctgttctggggttgtacatgtgtgtgcacacagatgaccctgtacagtgattgtatgcgtgcaccagtgagtgtggatatacttgcctgttctgggggtgtacgtgtgtttgtgtgcacacaggtgaccctgtacagtgattgcatgtgtgcaccagggagtgtggatatacttgcctgttctgggggtgtacacgtgtgtttgcacacagatgaccctgtacagtgattgcatgcgtgcaccagggagtgtggatatacttgcctgttctgggggtgtacacgtgtgtgtgcacacagatgaccctgtacagtgattgcatgcgtgcaccaggtagtgtggatatacttgcctgttctgggggtgtacacgtgtgtttgcacacagatgaccttgtacagtgattgcatgcgtgcaccagggagtgtggatatacttgtctgttctgggggtgtacacgtgtgtttgcacacagatgaccctgtacagtgattgcatgcgtgcaccagggagtgtggatatacttgcctgttctgggggtgtacacgtgtgtttgcacacaggtgaccctgtacagtgatcgtacacgtgtaccagggagtgtggatatacttgcctgttctggggttgtacgtgtgtgtgtgcacacagatgactctgtacagtgattgcatgcgtgcaccaggtagtgtggatatacttgtctgttctgggggtgtacacgtgtgtttgcacacagatgaccttgtacagtgattgcatgcgtgcaccagggagtgtggatatacttgcctgttctgggggtgtacatgtgtgtgcacacagatgaccctgtacagtgattgcatgcgtgcaccagggagtgtggatatacttgcctgttctgggggtgtacacgtgtgtttgcacacaggtgaccctgtacagtgattgtacacgtgtaccagggagtgtggatatacttgcctgttctggggttgtacgtgtgtgtgtgcacacagatgactctgtacagtgattgcatgcgtgcaccaggtagtgtggatatacttgtctgttctgggggtgtacacgtgtgtttgcacacagatgaccttgtacagtgattgcatgcgtgcaccagggagtgtggatatacttgcctgttctgggggtgtacatgtgtgtgcacacagatgaccctgtacactgattgcatgcgtgcaccagggagtgtggatatacttgcctgttctgggggtgtacatgtgtgtgcacacagatgaccctgtacagtgattgcatgcgtgcaccagggagtgtggatatacttgcctgttctgggggtgtacatgtgtgtgcacacagatgaccctgtacactgattgcatgcgtgcaccagggagtgtggatatacttgcctgttctggtgttgtacatgtgtgtgtgtgcacacagatgactctacagtgattgtatgcgtgcagcaggtagtgtggatatacttgcctgttctgggggtgtacacgtgtgtttgcacacagatgaccctgtacagtgattgtatgcgtgtaccagggagtgtggatatacttgcctgttctgggggtgtacatgtgtgtgcacacagatgaccctgtacagtgattgtatgcgtgcaccaggtagtgtggatatacttgcctgttctgggggtgtacacgtgtgtttgcacacagatgaccctgtacagtgattgcatgcgtgcaccagggagtgtggatatacttgcctgttctggggttgtacatgtgtctgtgtgcacacagatgactctgtacagtgattgtatgcatgtaccagtgagtgtggatatacttgtctgttctgggggtgtacgtgtgtttgtgtgcacacaggtgaccctgtacagtgattgtacacgtgtaccagggagtgtggatatacttgcctgttctgggggtgtacgtgtgtttgtgtgcacacaggtgaccctgtacagtgattgcatgcgtgcaccagggagtgtggatatacttgcctgttctgggggtgtacacgtgtgtgcacacagatgaccctgtacagtgattgtacacgtgtaccagggagtgtggatatacttgcctgttctgggggtgtacacgtgtgtttgcacacagatgaccctgtacagtgattgtacacgtgtaccagggagtgtggatatacttgcctgttctgggggtgtacacgtgtgtgcacacagatgaccctgtacagtgattgtacacgtgtaccagggagtgtggatatacttgcctgttctgggggtgtacacgtgtgtttgcacacagatgaccctgtacagtgattgtacacgtgtaccagggagtgtggatatacttgcctgttctgggggtgtacatgtgtgtgcacacagatgaccctgtacagtgattgcatgcgtgcactagggagtgtggatatacttgcctgttctgggggtgtacacatgtgtttgcacacagatgaccctgtacagtgattgtacacgtgtatcagggagtgtggatatacttgcctgttctgggggtgtacacgtgtgtttgcacacagatgaccctgtacagtgattgtacacgtgtaccagggagtgtggatatacttgcctgttctgggggtgtacatgtgtgtgcacacagatgaccctgtacagtgattgcatgcgtgcaccagggagtgtggatatacttgcctgttctgggggtgtacacgtgtgtgtgcacacaggtgaccctgtacagtgattgcatgcgtgcaccagggagtgtggatatacttgcctgttctgggggtgtacacgtgtgtgtgcacacaggtgatcctgtacagtgattgcatgcgtgcaccagggagtgtggatatacttgcctgttctgggggtgtacacatgtgtttgcacacagatgaccctgtacagtgattgcatgcgtgcaccagggagtgtggatatacttgcctgttctgggggtgtacacgtgtgtgtgcacacaggtgaccctgtacagtgattgcatgcgtgcaccagggagtgtggatatacttgcctgttctgggggtgtacacgtgtgtgtgcacacaggtgaccctgtacagtgattgcatgcgtgcaccagggagtgtggatatacttgcctgttctgggggtgtacatgtgtgtgcacacaggtgaccctgtacagtgattgcatgcgtgcaccagggagtgtggaaatacttgcctgttctgggggtgtacacgtgtgtgtgcacacagatgaccctgtacagtgattgtgtatgtgcatccctgcctctgtgccatggtatatatatgtgctctgtgtcctgcagtgagttgtggctgcagcacagcctcataggcatatgtgtgcacatttgttctctgaacacacaggggcttcacatgtgtgcacgtgtgttctgaataaccaggtatgaattgggtacatctaggccctctgggccaggtgagacctgagcgtgtatacctactggcttgtctctgcaactcaggtgtacatggaacaaataggtgtgagtccgtgtgtgtgagcctgtgccctgcgcacgccatgtgtgcattcctgtgtgcgcatgtgctgttgtgctcggatggtctctccagccacccagctgtgattccctcttccccgcaacaggagagctgtgctcgtgtcctgctcttccgtggagctaacagggatgtccgcaactacaacagccagacagccttccaggtacaccggtggtttacaggagctcaaggctgccccagaggtgtctgtctctgtgtccatgtgacttgacttctctgaaccttggttcttccctggaaggccctaagggagcacctcccccaggactgcccacaggaggtgttgggggacgagcccagcacgcgaggggtatttggtgttgatgttcccttcgtcccctcgccagggagagaggagggtcagcagggctctggggcaggggtatggggaaaatgagaagactggggtgacaggtgtgggtctgaccccccaaccccgagagaccagcaggggtgcagaagccaaactgcagagggggtggagaggggggtggtggaggggggtggtggagaggggggtggtggagggggatggtggaggggggatggtggaggggggtggtggagagggggtggtggagaggggggtggtggagaggggtgtgatcctagccgctgatgtaattcaggggaggtttccgggccctttctctggccaggttggttggcactgatgaccaggtggacgtggtctctgacttggagtttgttggggagtcgggaatattgtgggggtttgcggaccaggaacagagccagaactcctctattttcagtaggagtgagatgtgggaagagtggtcaggctgctgaggttgtgtggtcatagaaggtggaggcagcagtgggctgccagatgggtttgggcacactgggaagcagatacgcccgggcctgttggatgactgggtgcagggtcacaggaaggggaggatgagcttggcagcttgggcagctgcggggccttggctgagatgggaaacatggctgcatgttgggacagaccagtgtgcccgtttgcttgggactgctggttttagctctgaacttctgtccaggcagcccctcagtcccaggcagacagagggtgggtcactccagttatagggtgtgcctgtggcatcccagttacagacaagagtgtgtgtcagtagagaagaggaatgggctggggtctccggggcccccaaccaaggaagactccacacacgaactggagaaggagcagctggggctggctggcgaggcaaagctggtgctgctcagcccctccctgctcctcaaggccttgacctcccctttccctcaggtggccatcatcgcagggaactttgagcttgcagaggttatcaagacccacaaagactcggatgttggtgagttctgcccacctgggcgaccctgctgaatgtagattcgtgtggttttctggggcccagcagatgtgggggtcagtggtgacataaaggggccccacaccccacatctacactgtgtggccagtggtctctgagtggccactgcgggcatgaggaacgggccacagggcctgtgttgagtgaacattgtttttggtctgggagaagagcatggtgaggtttgggctgtgggccggggctagcattcagcttagggggcagcataggttgagagtggggttgaagttagggtcagagtccctgtttcccgttaaatcctaggaagagccagcaggagacatgggggtggtggacctcacttcaccctggagcaagcatgagtcttggtggtccgtagcaagctctcagcatggaaagatcatgtaaacgacacataaggaaaacaacagtgatgggaaagcagaatggggctgggaatagtgccatagccatcctcagggcaaggagctctgagccccctgctgcctgcgagtagaggaaagcctggtgtgtgcgtgactcacggtcctggaaggaaaaccaggagacacacacgtggcctcagccaggatacccgagcctcttggaggtctctggtgggtgtggggccaggctgggaccgtcctgttgtagctgccggagtcccctctgggagagttgtagctgccggagtcccctctgggagagttgctgctggccaggctgggaccgtcctgttgtagctgccggagtcccctctgggagagttgtagctgccggagtcccctctgggagagttgctgctggccaggctgggacggtcctgttgtagctgccggagtcccctctgggagagttgctgctggccaggctgggaccgtcctgttgtagctgccggagtcccctctgggagagttgtagctgccggagtcccctctgggagagttgctgctggccaggctgggacggtcctgttgtagctgccggagtcccctctgggagagttgtagctggccaggctgggaccgtcctgttgtagctgccggagtcccctctgggagagttgtagctgccggagtcccctctgggagagttgctgctggccaggctgggatggtcctgttgtagctgccggagtcccctctgggagagttgctgctggccaggctgggaccgtcctgttgtagctgctggagtcccctctgggagagttgtagctgccggagtcccctctgggagagttgctgctggccaggctgggaccgtcctgttgtagctgccggagtcccctctgggagagttgctgctggccaggctgggacggtcctgttgtagctgccggagtcccctctgggagagttgctgttggccaggctgggaccgtcctgttgtagctgccggagtcccctctgggagagttgtagctgccggagtcccctctgggagagttgctgctggccaggctgggaccgtcctgttgtagctgccggagtcccctctgggagagttgctgctggccaggctgggaccatcctgttgtagctgccggagtcccctctgggagagttgtagctggccaggctgggaccgtcctgttgtagctgccggagtcccctctgggagagttgctgctggccaggctgggactgtcctgttgtagctgccggagtcccctctgggagagttgctgctggccaggctgggaccgtcctgttgtagctgccggagtcccctctgggagagttgctgctggccaggctgggactgtcctgttgtagctgccggagtcccctctgggagagttgtagctgccggagtcccctctgggagagttgctgctggccaggctgggacggtcctgttgtagctgccggagtcccctctgggagagttgctgctggccaggctgggacggtcctgttgtagctgccggagtcccctctgggagagttgtagctggccaggctgggaccgtcctgttgtagctgccggagtcccctctgggagagttgctgctggccaggctgggaccgtcctgttgtagctgccggagtcccctctgggagagttgtagctgccggagtcccctctgggagagttgctgctggccaggctgggaccgtcctgttgtagctgccggagtcccctctgggcgagttgctgctggccaggctgggacggtcctgttgtagctgccggagtcccctctgggagagttgctgctggccaggctgggaccatcctgttgtagctgccggagtcccctctggtgcctgtgcctctctctggtatatggactcccaggacccccttcctgccatgagtgtttactcgtgggtgtccccattttttgtttttgttttaatttgaagtgacagcgggcagcaaacgtctggagcagatgttagggttggactctcacttggttctaatgtgaggtcatggtcagggctggagttgaattttggactggggttaagattaaggtcggtttcatgtttaagggcccttcttctgtagagttccccctgaacatccccctgtaaggcttggttatgagcccctccaccccaggctgtgtcagttgaaccatctgaggctgtggcagaccctcggtgaatgccacagctgctctcaaggccactgcagggaagtgtgtgttgaggaagtaactgggccagtgggatgggtaggatcggagtccagggtcaggtcaggggagaactgtggtaaggtttgggtttgcataaggggcagcagatagttacttctggtttgggctggtgttttggaggtggcccttagtgttggaaggccctggtttgtgcatgtgtggggcctcttcctctttttttttttttttttgagatggagtctgcctatgtagcccaggcaggagtgcagtggcgcgatcttggctcactgcaagctccgcctcctgggttctcaccattctcctgcctcagcctcccgagtagctgggattacaggtgcccaccatcatgcctggctaattttctgtatttttagtagagacggggtttcaccgtgttagccaggatggtcttgatctcctgacctcgtgatccacccgcctcggcttcccaaagtgctgggattacaggcatgagccactgtgcccggccagggcctcctcttctgcctataattgtctaaccgtgggaaagctgtctgggacctctgcgcctcagtttctcttaagtgaaacatggtctcttatggtcatttgcatccccttccccctgtggtgtcctgtggcgtttgatcctgggtggggctggactcttgccggtggccttggtctagttgcttggagggagggcgggaaggccccatctgcccctcatctgtgcgttgtggacagataccccagggctcttggagtcaccatggttgcgacttactggctatccaacctaggtgtgcttgcttggttggagttagacacacgtccctcagtggtaaggagcaggcacctgtgtcagttcatcctgatgtggtcgtcggctccatgggccaacaacacccttacctgatcaggtgccacacacagacactagggtgacaccgccagatttccctgagtacaggcagcatatttgtcaggatttaatacaagccccttatctcaatttgccctctcaacaaccccccaaggagtgattagactgttttacggagaaggaaactgaggcacagagggggttaattcagacctgattgattcagggtctgcctttgtcactcccatgccctccgtacacatttgctccaaggacaggacagtcatgacttgctacatcctatgcccactggggtcccagagtggggcctgtacacagaagaggaactggaaggaggtgccgccttctctggtgggcaggtgccacccggtgggatctggtagactgggacctgtgtaacccttcaggcaacaggatagcttgctgcctctcgacagccttgcttgccccctctagactgacaggccttgggtggggtccctggcctgggcgtggaatgggcatcccacagtgcttttgatgagtaccttggggaaatgcttctccagggtgctgtcatgcccatgagaacacacctgtgcctgggagtgtgtgcctgagagagggtaagagacaatgtggacccaaagagtgacccgacgtgacagaggcaaggaagcagaggtgaccacttctaggccagaatgattcagtagcgttctgtatattcacggtgttgtgcagccgattctattgaattcaaaacattttcatcaccacaaaagaagaccctggacacattaagcaataattctgcatcaattaccctctccctccaactctgtcagccattaacacactttcgtctctgtggactatagatttacctattcttgatatttcatgtcaatggaatcatataataagtgacacttagtgtctggctgcttttactcaacatgtttttgagcttcaccttgtaggatatatcactgcttcattccttcttatggctgaataatatttcactgttggtataaatgacattttgtttatgcattcatctgtcaatggatatgtgggtttctaccttttgactgttttgaatattgctgctgtcaacatgtgtgtacatgtacttgtttgaatatctattttcaatctcttaggtatatacctaagaatggaattttggaatcatatgataattctatgtttaacttcttgaggaactgccaaactgttttccaccattttgcattcccaccagtgatgtatgaggcttccggttttttcacatcttcaccaacagttgttactatcttttttttttgaccgtagccatcctagtaagtgtgaaatggtatttcattgtgattttgacttgtatttccctagtgactaatgatgttttgcatcttttcatgtgcttattgggcatttgtatatcttctttggagaaaagtcaagtcctttgtccatttttaaattgggtcatttatttttgttgttgagttgtaagggttctttatatattctgaatactaaacttgtgtggaatatgtgatttgtaaatattttctctgtagaataggagatccttgtcacttttttgataatgtcctttgatgtacaagaatttttaattttgataaagttcaaggtatctatttttttcttttgttgttcatgcttttggtgtcataggtcacgagggtttatcctctaggttttcttctaagaattttacggttttcactcttaggtcactgatccattttaagttttaacttctgtttatggtgtgaggtagggagccatcttcattattttgcatatgaatatccaattgtccagcaccatttgttgaagagactattcttttcccattgaatggtcttggcacccttgttgaaaatgaattgatcctagatatgtgggtttatttggactctcaattctatcccagtggtctacatgtatattcttatgccaggaccacatggtttgattactgcagctttgtagtaactttttatttttatttttttggagatggagttttgctcttgtcacccaggctggagtgcaatggcgcagtctcagctcactgcaacctccgcctcccaggttcaagcaattctcctgcctcagcctccaaagtagctgggattacaggtgtgtgccaccatgcccagctaagttttgtattattagtagagatggggttttaccatgttgggcaggctggtctcgaactcttgacctcaggtgatccacccgcctctgtctcccaaagtgttgggattacaggcatgagccactgcacccggagtgtagtaacttttgaaatcaggaggtttgagtgcttcaacttgttcttatttgttatcgttttggctaatcagggcccctggcaattccatatagacttgaacattgcttttctatttgtgcaaaaagggacattggaattttgcattgaatctgtcatcactctgggtgacattaacattttaacaccattgtcttccaattaatgaacatgggatgtccttttatttatttaggtcatctctaagcagtgttttgtcattttcagtatatagatttttttacttccttagttaaatttattcttgattattttcttcttctggatgctattataaatggaattattttcttaatttcctttttggattgttcattgctggtgtgtaaaaacaagtgatttttgtgtgctgatcttgtgccctacaactttgctgaatttgtttattagctctagtagctcttttggtgtattctttgggattttctacatataggatcatgccatctgcaaatagagatagttttacttcttccttcccaatttgggtgccttttttttaatttttatttttgcctgtctagaactttcagtacggtgttgaataccagtagtaaaagcaggcatctttgccttgttcctgatcttagggggaaagcattcaatctttcaccattgtgtatggtgctatctatgtgtgttttttttgtttgtttgttttttgttttttaaatatggaatgcttcattaatttgcatgtcatccttgtgcaggggacatgctaatctctgaatcattctaattttagtatatgtgctgcagaagcaagcacttcggatttttaataaatttcctttattatgttgaggaagttactagcttctattactagtttcctgagtgtttttataatgaaagagtgttggattatggcagatgctttttatgcatcaattgaaatgatcatttttccccctttgttctattaatgtgatgtattatattgattacattagtctgtagatttcttttcctgcaatgcccttatctggctttggtagcagggtaatactggcctcgtgaaatgagggagtgttccctcctcttctgttttttggaagagtttgagaatttgtgtcaattctttaaatttctagtagagtgcaccagtgatgccatctggtggtggacttttcttcgttgggaggcttgtggttaaggattcaatctctttgcttgttataggtctgtttaaattttctgtttcttcttgagtcagttttggtaatttgtgtttttctagaaatttgtctacctcatctagcttttctatttgttggcatgtaattgttcatagtgttatattcctttttaacttctgtaacactgatagtaagtccccaaatttcatttgtgattttagttatttctgtccatcttctctccttactagtcaatctagccaaaggtttgtcaattatgttgatattgtcaaagaaacaaccttttatttccttgattctccgctgtttttctcttttgtttatctctgctctaatcttactgtttccttccttctgctagcttttctttcttttgctagtttggtttgctcttctttctcttgtttttttgtttgtttctttttggtctttctctagtctgtccgtccctccgtccctccctctcttgcttccttcctctttattttgtttgctcttctttctctagtttcttcttttcttctctctctttttttttttggagatggagtttcgctcttgttgcccaggctgtagtgcaatggtgtgatctcagctcaccacaacctccgccaactgggttcaagcgattctcctgcctcagcctcccgagtagctgggattacagggacccaccaccatgcctggctaattttgtattttttagaggcagagtttcttcatgttggtcaggctggtctcgaactcccaacctcaggtgatctgcctgcctcggcctcccaagtgctgggattacaggcatgagccactgtgcccggcctcttttcttttcttttattggttcattcatacagacaaggtctcactatgttgctaggctggtcttgagctcctgggctgaagtgatgctcccgctttggcctcccaaagtgctgggattacaggcatgagccactgagcctcgccttctcgtttcttttttgtttcttttttttcgtgagatggagtttcactcttggtgcccaggcggtagtgcaatggcgcaatcttggctcaccaccacctccgcctcctgggttcaagcaattctcatgcctcagcctcctgagtagctgggattacaggcatgcactgccacacccggccaatttttgtattattagtagagacggggtttctccatgttggtcaggctggtttcgaactcccgacctcaagtgatctacctgccttggcctcccaaagtgctaggattacaggcgtgagccactgaacccggccttctcttgtttcttaagatgtataattaggttattgatttgagattgttttcctttttaaaagtaagtgtttacagcgttgtttccctttaagtactgcttttgctccatatgttgtatttttgttcttgtttgtcttaaagtgttttctaattttccttatgattgatttcttttttctctttctttcttttttttttttaagagatgggatctcactctatggcccaggctggagtgccctggcttgattttggctcactgcagcctcaacctcctagtctcaagccatcctcccacctcagcttcctgagtagctgtaactacagggtgcagcaccacacctggctttttctattttttatagagatgggggtgtcactatgttgtccaggctggtctcaaactcctgacttcaagtgatcctcctgccttgacctcccaaagtgctgggattataggcttgagccaccatttcttttttgagcctggtttcttttttgacacattggttgcttaggagtatggtgtttaatttccacatatttgtgaattttccagttttctttcacttctcgatttctagctttgtttcgttgtggttgaaaaagatactttgtatgatttcagtcttttaaaactttatcaagacttgttttgcggccaaacatacagtctgtctgggagaatgttccatgtgtactcgagaagaattcttgaatatattctgctcttgttgggtggcatgttctgtacgtatcgttgagtctaattggtttaagtcttctatgtccttattgatctctccagatgttctacccattattgaaagtaaggtattaaagtttcttactattattgtggaactgtctatttctctcttaaattgtgttgtttgtatcatattttgatgttctgttgttcggtgtgtatatgttagtaattgttaatcaacatataatgtccttctctgtctcttgttacagtttttatcttaaagtttattttgtatgatgttaatataaccacccagctctcttttggttactatttacattagattgctttttttatcctttcactttgaacctatttgtgtctttggatttaaagtgattattttgtaagtagcatatagttggataatactttttaatcactatctgctttttaagtaaaattctattggaacacaaacacacctatctgcttgtatgttgtttgtggtggttttcatgctgcggtggcagagttgagtcattgcaacacagactatatagcttgcaaagccttaagtagttactgtccaattctttccagaaaaggtttgctgatccctggtctagaatgtcttttatagtttccctggttatagttaactgcaaatggtcctgttcagcagtagtctggtgagattcgtcacatgtagcctgttttgtctctcctgaagcttgtgaaatgcagttcttagagcatatctgagcaccctcaaggcccctttcggctgagaggagaagcaggcttctacctctgaagctagggtgagaggcagtttgactgggatgtggccccttaatggtagcttcatttgtagggtggccaactcttttggtttgcctggaaccaaggcagttcctggaacataggatttagttttaacatctggaaagcctgggcaaactggacaagttggtcacccagctggctgttcagagtcttacctatgcccccttaccccagtaccattcagggaaacccccagctatgcgaagcggcggcgactggctggccccagtggcttggcatcccctcggcctctgcagcgctcagccagcgatatcaacctgaagggggaggcacagccagcagcttctcctggaccctcgctgagaagcctcccccaccagctgctgctccagcggctgcaagaggagaaagatcgtgaccgggatgccgaccaggagagcaacatcagtggccctttagcaggcagggccggccaaagcaagatcaggtaggagggggctggcaggccctggaggggttgggagggtggggtgccgggacctgagccaggaggagccagcaccgggaggcagagagaggcctggtggtgcctagcacctgtgtagtgatgggctagggcttcctggttggggaagggaagaaggcatctctggaggtggggacaggcacatgcacgctgatttccggttggagctgggcttgccatgaggacagtgggcagttgagggagcgtgttaggtggagagggtatgctcctacctgtgatttagaaaacacactgcattgtcaggcatggctgggaagagtcagggctggtggcctgtggtaagggggacagggatggagttgccactccagtagggcccaaaacctacaggtaagccccagccctgtccccagggtatactcatggtttcccccagccctggcacacctacaggactctgtggcttctattctttaccctcaccctgaggcctgggtccctgaggcagggatgcctggaccggagcccactggcctctctgggctgtgcattgggtgctgaggtgggcgcactggctctcagccactttgtgcctgggcttctcatcagtaagtgggaatagtcctacctaagtcattgtctttgggaagccttccagaatgccctgggcaggtgagggatcacctggcagagtctggcaactgccggtaaaagcacctgccctccctgtgccttgaaggcaggcaccgtctttgtcgtttcctagtttcatcagagccaggcactgaggagggtgtttggcagacattgttgagtggaagagttacataaacagtatgttgttgtcaggatggccgccggcctttacagttctgtcagtccaggcccgctgttgggctgaatggcatgtgtatactagctcctttaaccttgacgaacgtacatgttcatgctctattaataccatgttacagatgagcgtcctggtacgcaggtggggcctgtgacgggtccagagtcacagagctacggatcagcttcactgggccccaggtagacccaatccccaactttctaagcctgagtgttcagcagagggctcagggtgcagcagggcctatggaaggcgccccttcctgtgctgccgcccctgctctgcagcctggtctcagcgatgtctccgtgtctgtctttgcctgggcttgttggactcgcaaggctggctgtactgccccaaatctcaattctcccctgaagctttcttatagacccgcggattttctaagggctgggcggcccagtggctgaaagaacacattctgcattccggatgtttccatcccgcagaaaggctgctcctgagttggaggcacgcgttgccacaggctcctccctgcattcattttttgtacgtgttcattcatcctttcagcagacacaaaactaagacctgctgtgtgaggggctccagctcacctgctctgtggggatggcagaattctgttttttccttcctcgcaaacatttattgggtgcctggtgcgtcagaggtggtgggtctcaggaagttgacagccgagggcccgggctaagcagcagttaggtgggcagtgatccccttatggggctgccctggtgagtggacaagggtctgcagctctcgggaggggctgaggaagttcggtgccccgaggagagaagtcaccccctgggggaggcgaggctgggccctgcaccgcgcgggtcgctgcgccctctgtcggttgagccggaccgggacccgacccccatcagccccccagtatcacacggggcacggcgggggagtttgggctgagagcccgtcacttaacagctggcccaggggtcaggatgttagagtagttcaggtgttggcaactgcgtgacggacagcccacaggaggggaaggagaggtgccccgtgtgactagagcgtagcaaactgccaagcccgagggagcctggctcttggaaaagcgggtggctctggcctgcctgggtactagggagccactgcaggcttctgagcagagccccagtggaggagtgagagctcaggctctaccccagtctgggagtggtctggggaaggtgggcatcacgcagtgggcgtgggcaggggccggtgtccaggacgaggggacccaggcctagagggggactgggcacccagcgatccgggccctggacctggaggggtggggggggcgcccctccctcccgttcaccggctccaggcggctttgctggtgcccgaagcccccgccccatcccccgctcccactaggctgccctgaccaccgtcccgcgtccgcgtccgaactccccctcccgggggtcggcggcgaggggagggcgggagggagggcgcgagggccgccaccaccgcccgcagagggaggagcccggccgtggaggaggcggggcgcggggcggccgcggcatggagcgagcctggcgcgcccaggagctgtattcgaattcgagctcggttccccgcgccccctgcgccccccgcaccgccgccccggggcccgaagcggaaactttacagcgccgtccccggccgcaagttcatcgccgtgaaggcgcacagcccgcagggtgaaggcgagatcccgctgcaccgcggcgaggccgtgaagggtgaggggcgcgggggggcgcgggggggcgggcccggcgcggggagggggcggcgccgcgcgcggtgctggccgggccggggcagtggctctggggtctcctctgccggggcggccctgggcccttgtgggatccctggtgtcacggtgaagggctctgcctggggaaggttcctgccgtgcgggtccctccggtgctctgtcgttccgggctccctgtgtcaccacggaggctcctctctcgccacgggcgtttctgtgtccccgggggtctctgcctgaaggaccctgtcccattacagagcttccttgcattgcggggttcccgtggcacttctgcagcttctccattggaggcccctgcgatgtgggggacccttgccgtcgtggggtgtctgtgaccgtcatgtgggtgtttgtgttatgcaggcttctgtcaccggggcttcctgtgttctggggggatcgcgtgccatgacaaacccctctcattctgggggtctcggggccatcactgggctcctagcctcagggccggctgaggtggaaacagcccagctggtgcatcacgtggcctcacccactggccacagcacgatgaccccgagctctcggcagtgacccctgggtgggtgacagagccaggatgggggtcggttgaaggggctgggggagcatggtcagctgggggtgggggcagcagcaggagtgtggcccctgcccctgcctgcgcccctccccgagtgtgtccatctgtgtgtctctctgtcccccacatgcccaccctgtgccgagcccatctgttcctttctctcttctgcgtggatcccaaaatcttcccagggaaaaagctgggagaaagtgggaagggaaggagggaaagggcagggggtgggtgggcagaacctgctcctgaggtggggtaggcgcccagctctgctccccactgacggcctgtctggcttcttcctccagtgctcagcattggggagggcggtttctgggagggaaccgtgaaaggccgcacgggctggttcccggccgactgcgtggaggaagtgcagatgaggcagcatgacacacggcctggtgagtgaccccacggctccccgggcagctcccaaggggaccaccccttccagtttccctttgttctctcttggtgctaaatccacatggatattcatagagaaaagactagaggtaaactcaaacaaacactcaaagtagatgcaaacttgtgtacatgacacagacacgtgtgcacacactctgcatatacttgggaacatgcgtgtatgtaacctgacgcttcacgtgcagtggagacacataggacgtgtgtgacggggcctctgtctgtgtgatcccacattgactcccagtgacttgcaccccaccagcacagtccttcagaaacaccaggtgtgtggaacgcatgattcctgcgtagctggcagacatgtaaggaggtcagtgtgagaaaagaggcgtttttccaaagtggacagattgtccaagtgggcagagcaggcaggcccggagcagccaagaggaaatgaggccagttgggcctggaggtgccctggtgagtgccctggggcagggatggtctgagggcagcaggtgaggctgggctggtcctcagcctgcagggaggatgtgaaggtgaaggctgcagctcctgggttggtgagtggctgctgtccagccctgctgaccatctggtcctttgggggcccccgggctggagctgggtgcgtgtcttgggggtgcccttgcaaggaaccctcaggggtcccgggaggcccccagatccatgcatgtgcttctgtcctggagagctggtgggccaagcaaacctctcctgagtgatggtcactgggggccatcggtggtgtgtctggatcaagggtgcatgcaccctccctctgcatgtgaagggctcaggcctggggttactgtgtccccatctctgtgtccccacctctgagagtttcccagcgactccacccctgtacggcctggacccctgccctgtgctgagctcagcagaggcccagggaggcaggagcttcgccactgaccttttcctgggccggtgccctttcctccttccttggccttgttctgccttgctctgactggtggcttagagtgtggaagggacttggccccctgttctcagcccgcggagggtggatagggcagggtccagatgggaaatggtttcagagatttgggccctggttcagacagtatgggagaggggaggggaaggagaggtagggggatccacacctgtggcgggagcgggtcttgagctcccccacgtggtggtgaggaaggttctggtttgaggactgtgtggagtgaggggcatttggacctacgtctgaagctgacggggagggaggggggtttaggctggagtcagaattggagagcagcaaatgttttttaggtgtttgtcatgtgctgggccctgtgctgggagccgggatcacggaggctcagctggaagccttgtgggagcagtggctgtgacgggggccgtgtgagcgtgggagctccctgggctggcctgaaggagtcagagagggcctcaaaacagaggcattgtctgagctgagtcctctaggtggtcagcggctggggctgaggggacagccgtgtgtgcagggtccgtgtggcgctctacagctgtgtgtcagcacggcctgctctgagtgcctggcacagttttagcacttctacacgtataagtcgttgactcatcccagcagtcccaagaggtggggccacttgttgttattccatttctagggggtcacatggccctgaggggcaaagtcttgtttgcaacacaggcagcaagttctatgtgagtgaaacgcctgcatggggtgaggggcgaggctggtgtggggaccacggggtggtcaggtggcatggagtcaagtgacagtgtggcatcatggcggagggaacccagccgcagtgtctgattgtgcaggttgtgtaggatcaaagcccgggctgggcagagcagagcaatggagaggagggttcaggtctgggctccagccagcagccatggtgtgtgtgacctggggagtgagtgtcagaggtcccggggtagacgggagtatttcatgagtgggcagcgggagagggacctgcggaggctgcctgcgaagggcagggagtgggagcagtgacagtgccctctgaccttggctgcaggccctgctggccacactgcgcagagcctctgctctgggatcccggggccgagttctgccagaggccagagtgcagcccaggaacaggaacctgcttccaacaggcccagatctgctccccccaccccccaaaaaaatccatttccgggactggagtggggacagaaaaggacttaaaggttagggaggggacatagtccctgtgcgtgcaggggctggtgcccagagccggtgcctgctgtgggatcgggaggcgagtcctggtcacttacccagcagagagcagtctcccacggcacctcctggcaggcagagggtggagctgtgagggagggaatggagaagcgaggtcaggtgtgttctggaggcccagcaggagcaggccctgtgccttccctcccctccctccttccctttctttgcagtaaggtcagcacttgggtgggtagtaggagatggctgtgttgggcattttctcttcagctggcttttatgtgtcttattaacaaaactggaaaaatgagtttgtgttatgtaatccatacaatttgtttggttgacaacatctgaaaacaggaggctggtcaagtgcaagtgtggcgggttcttcagcaggcagcaccatgacacttccgtgcctctgtcgacgtggagaagggtgtgatggaggaaaggaggggtctgatgccccacctgagtggtgatgaggcttggcctgagctggccttaggttcagcgggatgaggggtgcaggtgtggttggggaatgccaggataagatataggtcatcagaaccaaggggatcctccaagttggatttctctattctatatgggcgggcttagagggggctgttgacttactgagagtcacacaacgtagtagctgggacctggaatccagcccgatacttttttgatatctgtgccttctgatagaaataggcactctttcctctttccgtccggccactgctccacctatgtttacagccatctatcctttgactcacccacccatcccaccatcatcttcttaaccgttgactcaccagccaacccaatccaccacccctcccttcctccatccatccacctctccacctacctgtctacacacccagtccatccatccatctacccatgtatctgtctgctctttgacctatctacccatggccctctccttccctccctccatccactggtccagtgcctttcaatccacccttctgtccgtctatctcagatgcacctgtccaccatttactctcctagtcagcatcccttctgtccgtctatctcagatgcacctgtccaccatttactctcctagtcagcatgcagaatgcctgtgacgtgccaggtgctgtgctgggtgctaggatcacagagataaagaacatgtggcccttaccctcaaggagctcacaattagtgggggaaacaggtcatcgaaagctgcaggttatctttctgatctcatttcctgccactctctctagctccctctgctccagctgcacaggctctgaactctctcaaatgctgcaggctgatgcctgccgtgggcttcccctgaccacccccgctcctgggaagccctttgcccacatatccacaggctgctccccatcctcagcctctgctcagccctcccgtgggggtgaggcctttgcgtgcctttctctgccctccctgatctgctcgctggtctcctgagcacttgccagcattcgcatgctatgtctttatcctctgtttatcctgtctcccagaacagattataaaccccacgagtgcagagactttgttctcttctctgctgtatttgcagagctggtacacagtaggagctcaataaatacttgctgaaggaaaacatggatcttgagaaatgctaccaagagaggaaatgaggaaggtgctgagggatgaaagcgaggcagtggtggtgctgcctgtggggcctttgcggtcctggagagtggagctgcggggctgggaaggctggtgggtggggctcgcaggcagctggaggagctcgtgggagcagagaggtcatggctggaggtgtggctcgaaccttcaggtcagtgagggtggagtggtgggcagacagctggctagcttggtgctggccatgtgggacttgagatcaagaggacagttggggaccaagctctgtgggatgcatcgaggtcagggcaggggacccagcccacacacctagatcccctgccccactcacagttagtctgaagcaagggaccccatgaggttgagcatcaaggagctattgtgaagaagttggtgaagacagaacgctgcttccatgccagcgcctataggcacatagcacggcatttgtacatgagtgtgggtaatgcagattcagatgtgcacacacacatgcatgaacacacctcacacgcacatgacggcaggtcacacagacacatgagcacggcacttgcacacagtgggctcatatagagacacgtgcatgagcacagcatctacacatgaccacggatctctcacacacacacgtatgtgcacacccccctctttgctcgcagccttggggctcacttacgctctgtggacggctctggccttgtttggactcctggttcagcagctacttaggaaagagatgagctgctgccccctcttgggccctgacccacggaggtcagaattccctacatcatcccctcagccttcttacctctggacccaggactccaggatttggggccccctacttccatctggacacaaccaggccaagggggtgtgtgtgggcagagactggtgaccagcatgggtgagggcagttgaggcaggccagctggaggccacgactgtccatcagctcccgatactcccttcagaaacgcgggaggaccggacgaagcggctctttcggcactacacagtgggctcctacgacagcctcacctcacacaggtacgtgcagggaccctggctggcgggagcatgcatgtgggacgtggggcaggacctgcagtgtagagggaggccaggtatgaagaggtcagaggagggcaagggaatgtgcctggccgacctctcttctgctgcccggcctgtcagtcccggggtgactgcagggtggactgtggccggccaacctcgaggcagggcttacctcactcctccctgctttccttcatcagcgattatgtcattgatgacaaagtggctgtcctgcagaaacgggaccacgagggctttggttttgtgctccggggagccaaaggtaatggggagtgggtgcccgggggtcaggcaggcaggggctgcacaccgctcagggatgtcttcagcttcttgcttctgcccccaactctgctctgccccacactccctccctgccttgcccctgcggctcccgcttttggccccggctttcctggttcctctgctcggtcgcgaccgtcgtggtttgcaacgtcccggcccaggcggcaattccttcccttcgttgttttccactgtctttgctctagagtctaaccgagtgggggcttttctggcatgggcaaagggagttttgcagagggtcatgtctaggatccttgggccggctcgtccctgcgctgtggctccccgtggccctcccccagccccgggtcactgccccccgcagtcatctctttcctgtgctgagccactcggaggttgctgtgtggcagccgcccccacccgaacctagctggtgaagcgccttcctaattgccccccgcagcagagacccccatcgaggagttcacgcccacgccagccttcccggcgctgcagtatctcgagtcggtggacgtggagggtgtggcctggagggccgggctgcgcacgggagacttcctcatcgaggtgaggtcgttctggccggtgctgcccagtgggatgctgagccctgagccctgtggtggacgtgcctggggcgtccccacccagctgcctgtctatcccaggtgaacggggtgaacgtggtgaaggtcggacacaagcaggtggtggctctgattcgccagggtggcaaccgcctcgtcatgaaggttgtgtctgtgacaaggaagccagaagaggacggggctcggcgcagaggtgaggggtcacgcttcaggcctctgtgcccaaactttcccctgaccttagacctttgacttcaggcccacattcctcttcccatccctgacccccaactgctgacatcagattcctgaacctcaatgaaccacccacacgtgtgggctgggacccctcccgatccctggtgctagactgccagtcctgtcccctggcctgaggcctttgacccctgacccctgacctcaggctgcccctcctcagatccctgccccctccttcccggcgttcccccagcccctggcgtggcagagccctccttccctacaccgccagcagctgcctggaggccggggttgccatagcaactgtgaggttgacgctgccgcgctgcttattgtcggagggaagggggaggcggcacctgagggaagaggaaaagcgtcttctccccgcgacgacgcggcacagcctgggcccaggaggctttgccggccaggcccagcccaggcccgtggcttggctgaccacaccctggccccacaaggggcagtggccacccgggcctggggggagccctggagcagcaggagccccgcccgcaaggagacccctcccagcccccaccccatggctctggtgcccccttgcttagccctcgaagcctgcagggtgggtgctcaggccagagccagccggcaccgtgacccccgccagcacccttgatcgtctcctgaggccctgattctgggggttcccagggcccctgaggccctgaccgcccgcccccccccccccgcactccctgagctccttgagccatgaagaagtttgcgtccagccgtaacctgaacaagatcctggcacagtgcgactcatcctcgcgggagtacgaggagatccaggcggtggagcgcaagtggcacctgcacctggccacgccgcgccgcctgctgctggacaggaggtccaaggcctccctcttctttgcagccccaccgccccccaagagggcccccagcaccacactgaccctgcgctccaagtccatgacagctgagctcgaggaacttggtgagtggcgggggtggcggtggaggtggacgcaggtggacggtccatgatgggcagacagggccgggagacacaggtggtacgggagggcaggcggtccagccagagggtaggaaggacaggtgggtacaagagcaggtcagaggtgaatgggtgggtgctggcgcgatggggaaatttggtgcttgtggggtgaggagagggtggcatgtggaaggggtgagatgtgagaggctggggatggacagtggggtgtccaggacagatgacggggagcagggcctggcccaccagtatgtttgcatgtgtgtgcatgtgtgtgcgtgtgctgcctctggttttccacgtctccactttgactttactcctgcatttcatccaagtgaggagagagcggtagtgaggtgaccagggtctgctgctggctctgccaggcactggctgtgtcagctctgtgtttattttaccctcttggtgactgtgcactcattgacaggtggccctgctgaccccacaggccacaggagtactgtcggtgggatgatggggcagggcctcgagcgcggcaggaggggagcaggagtgtgttggggtttgatggggcatgttctgggcacaagccctggttgaccatcaacagcctcttcatgggcaggtcttatatatgtgtccattaacaaccttgtcatgtgcacgtccagatatacttgatcatgtcctgacgtgacagtcagtagcctcttcatgggactgtcccattacgtgtgaccgttgtcctcactgtgggtatgtgctatacatgtggccatcaacagcctcgtcatgggcatgtcccactgtacgtgacagttgacaggctctttctttctttttttttttctttttttttttttttgagacagtttcactcttgttgcccaggctggagtgcaatgacacgttctcggctcactgcaacctccacttcttgggttcaagtgattctcctgcctcagcctcccaagtagctgggattacaggcacccgccaccatgcacggctaatttttttttttttttttttgtatttttagtagaggcggggtgtcaccatgttggccgggctggtctcgaactcctgacctcaggtaatctgcctgcctcggcctcccaaagtgctgggattacaggcgtgaggctctttctttctgtgatctgagcccagttctgttcccagacttaactctgcctctggtcatagaaggaaccccaactttggtcctaaactgaaccctgaagtcctggccacaggaagggaccccattctggttctaggctgagccctatccctggcttcagtcttggttctaccccagccatagaaggaacccttttcctggtccccagaattatccctgacctcactcatgaaccaagccctgaccctgtccttgccacaggctgagctgccccatgccaagcaggtggtcttaactgcagtttagttcagggtggagaacagctacca
